(19) United States
(12) Patent Application Publication
(10) Pub. No.: US 2011/0217302 A1
(43) Pub. Date: Sep. 8, 2011

(54) TCR Complex Immunotherapeutics

(75) Inventors: Valerie Odegard, Seattle, WA (US); Catherine J. McMahan, Seattle, WA (US); Peter Robert Baum, Seattle, WA (US); Peter Armstrong Thompson, Bellevue, WA (US); Philip Tan, Edmonds, WA (US); John W. Blankenship, Seattle, WA (US); Sateesh Kumar Natarajan, Redmond, WA (US)

(73) Assignee: Emergent Product Development Seattle, LLC, Seattle, WA (US)

(21) Appl. No.: 13/123,509

(22) PCT Filed: Oct. 9, 2009
(86) PCT No.: PCT/US09/60286

§ 371 Date: May 27, 2011

Related U.S. Application Data
(60) Provisional application No. 61/104,608, filed on Oct. 10, 2008.
(60) Provisional application No. 61/148,341, filed on Jan. 29, 2009.

(51) Int. Cl. A61K 39/395; C12N 15/63; G01N 33/566; C07K 19/00; C07H 21/00; C07K 16/46; A61P 37/06; A61P 11/06; A61P 3/10; A61P 19/02

(52) U.S. Cl. 424/134.1; 435/320.1; 435/7.24; 530/387.3; 536/23.4

(57) ABSTRACT

Single chain fusion proteins that specifically bind to a TCR complex or a component thereof, such as TCRα, TCRβ, or CD3ε, along with compositions and methods of use thereof are provided.

### CROSS-REFERENCE TO RELATED APPLICATION

[0001] This application claims the benefit under 35 U.S.C. §119(e) of U.S. Provisional Patent Application No. 61/104,608 filed Oct. 10, 2008, and U.S. Provisional Patent Application No. 61/148,341 filed Jan. 29, 2009, where these provisional applications are incorporated herein by reference in their entireties.

### STATEMENT REGARDING SEQUENCE LISTING

[0002] The Sequence Listing associated with this application is provided in text format in lieu of a paper copy, and is hereby incorporated by reference into the specification. The name of the text file containing the Sequence Listing is 910180_{—}416PC_SEQUENCE_LISTING.txt. The text file is 622 KB, was created on Oct. 9, 2009, and is being submitted electronically via EFS-Web, concurrent with the filing of the specification.

### BACKGROUND

[0003] 1. Technical Field

[0004] The present disclosure relates to immunologically active, recombinant binding proteins and, in particular, to single chain fusion proteins specific for a TCR complex or component thereof, such as CD3. The present disclosure also relates to compositions and methods for treating autoimmune diseases and other disorders or conditions (e.g., transplant rejection).

[0005] 2. Description of the Related Art

[0006] Targeting the TCR complex on human T cells with anti-CD3 monoclonal antibodies has long been used in the treatment of organ allograft rejection. Mouse monoclonal antibodies specific for human CD3, such as OKT3 (Kung et al. (1979) Science 206: 347-9), were the first generation of such treatments. Although OKT3 has strong immunosuppressive potency, its clinical use was hampered by serious side effects linked to its immunogenic and mitogenic potentials (Chatenoud (2003) Nature Reviews 3:123-132). It induced an anti-globulin response, promoting its own rapid clearance and neutralization (Chatenoud et al. (1982) Eur. J. Immunol. 137:830-8). In addition, OKT3 induced T-cell proliferation and cytokine production in vitro and led to a large scale release of cytokine in vivo (Hirsch et al. (1989) J. Immunol. 142: 737-43, 1989). The cytokine release (also referred to as “cytokine storm”) in turn led to a “flu-like” syndrome, characterized by fever, chills, headaches, nausea, vomiting, diarrhea, respiratory distress, septic meningitis and hypotension (Chatenoud, 2003). Such serious side effects limited the more widespread use of OKT3 in transplantation as well as the extension of its use to other clinical fields such as autoimmunity (Id.).

[0007] To reduce the side effects of the first generation of anti-CD3 monoclonal antibodies, a second generation of genetically engineered anti-CD3 monoclonal antibodies had been developed not only by grafting complementarity-determining regions (CDRs) of murine anti-CD3 monoclonal antibodies into human IgG sequences, but also by introducing non-FcR-binding mutations into the Fc (Cole et al. (1999) Transplantation 68: 563; Cole et al. (1997) J. Immunol. 159: 3613). Humanization of the murine monoclonal antibodies results in decreased immunogenicity and improved mAb half-life (Id.). In addition, non-FcR-binding mAbs have reduced potential for inducing cytokine release and acute toxicity in vivo (Chatenoud et al. (1989) N. Engl. J. Med. 320:1420). However, the cytokine release, even at a reduced level, is still dose-limiting and toxic at very low drug doses (micrograms/patient) (Plevy et al., (2007) Gastroenterology 133:1414-1422).

[0008] Several difficulties exist for improving anti-CD3/TCR-directed therapy. For example, the mechanism of immunosuppression mediated by anti-CD3 monoclonal antibodies is complex and not fully understood. It is believed that such antibodies function through four mechanisms: cell coating, cell depletion, TCR down-modulation and cell signaling, with the latter two as the main mechanisms (Chatenoud (2003) Nature Reviews:123-132). It is further believed that the induction of cytokine storm and in vivo T cell activation are required for efficacy of CD3/TCR-directed therapy (Carpenter et al. (2000) J. Immunology 165:6205-13). Finally, second generation anti-CD3 monoclonal antibodies reported to be “non-activating” in vitro have still induced a cytokine storm in vivo.

[0009] A number of anti-CD3 directed antibodies are currently being tested in the clinic for use in autoimmune disease, inflammatory disease, and transplant patient. These antibodies include hOKT3γ1(Ala-Ala) (Macrogenics), visilizumab (Nuvion®, PDL), TRX-4 (Tolerx), and NI-0401 (NovImmune). However, patients treated with each of these antibodies have experienced cytokine-release associated adverse events (moderate to severe) and sometimes viral reactivation above that typically observed in the patient population.

[0010] Given the cytokine-release associated adverse events related to current T cell antibody and other biologic therapies, there is a continuing need for alternative therapies. The present invention meets such needs, and further provides other related advantages.

### BRIEF SUMMARY

[0011] The present disclosure provide fusion proteins that bind to a TCR complex or a component thereof, compositions and unit dosage forms comprising such fusion proteins, polynucleotides and expression vectors that encode such fusion proteins, methods for reducing rejection of solid organ transplant or treating an autoimmune disease, and methods for detecting T cell activation.

[0012] In one aspect, the present disclosure provides a fusion protein, comprising, consisting essentially of, or consisting of, from amino-terminus to carboxy-terminus: (a) a binding domain that specifically binds to a TCR complex or a component thereof, (b) a linker polypeptide, (c) optionally an immunoglobulin C_{H2} region polypeptide comprising (i) an amino acid substitution at the asparagine of position 297; (ii) one or more amino acid substitutions or deletions at positions 234-238; (iii) at least one amino acid substitution or deletion at positions 253, 310, 318, 320, 322, or 331; (iv) an amino acid substitution at the asparagine of position 297 and one or more substitutions or deletions at positions 234-238; (v) an amino acid substitution at the asparagine of position 297 and at least one substitution or deletion at position 253, 310, 318, 320, 322, or 331; (vi) one or more amino acid substitutions or deletions at positions 234-238, and at least one amino acid substitution or deletion at position 253, 310, 318, 320, 322, or 331; or (vi) an amino acid substitution at the asparagine of position 297, one or more amino acid substitutions or deletions at positions 234-238, and at least one amino acid substitution or deletion at position 253, 310, 318, 320, 322, or 331, and (d) an immunoglobulin C_{H3} region polypeptide, wherein the fusion protein does not induce a cytokine storm or induces a minimally detectable cytokine release, and wherein the amino acid residues in the immunoglobulin C_{H2} region are numbered by the EU numbering system. Additional fusion proteins are provided according to claims 2 to 20 and described herein.

[0013] In another aspect, the present disclosure provides a composition comprising a fusion protein provided herein and a pharmaceutically acceptable carrier, diluent, or excipient.

[0014] In another aspect, the present disclosure provides a unit dose form comprising the above-noted pharmaceutical composition.

[0015] In another aspect, the present disclosure provides a polynucleotide encoding a fusion protein provided herein.

[0016] In another aspect, the present disclosure provides an expression vector comprising a polynucleotide encoding a fusion protein provided herein that is operably linked to an expression control sequence.

[0017] In another aspect, the present disclosure provides a method of reducing rejection of solid organ transplant, comprising administering to a solid organ transplant recipient an effective amount of a fusion protein provided herein.

[0018] In another aspect, the present disclosure provides a method for treating an autoimmune disease (e.g., inflammatory bowel diseases, including Crohn's disease and ulcerative colitis, diabetes mellitus, asthma and arthritis), comprising administering to a patient in need thereof an effective amount of a fusion protein provided herein.

[0019] In another aspect, the present disclosure provides a method for detecting cytokine release induced by a protein that comprises a binding domain that specifically binds to a TCR complex or a component thereof, comprising: (a) providing mitogen-primed T cells, (b) treating the primed T cells of step (a) with the protein that comprises a binding domain that specifically binds to a TCR complex or a component thereof (e.g., a fusion protein and an antibody), and (c) detecting release of a cytokine from the primed T cells that have been treated in step (b).

[0020] In another aspect, the present disclosure provides a method for detecting T cell activation induced by a protein that comprises a binding domain that specifically binds to a TCR complex or a component thereof, comprising: (a) providing mitogen-primed T cells, (b) treating the primed T cells of step (a) with the protein that comprises a binding domain that specifically binding to a TCR complex or a component thereof (e.g., a fusion protein and an antibody), and (c) detecting activation of the primed T cells that have been treated in step (b).

### BRIEF DESCRIPTION OF THE DRAWINGS

[0021] FIG. 1 shows the percentage of activated T cells resulting from treating PHA-primed human T cells with various antibodies and small modular immunopharmaceutical (SMIP™) products. “No Rx” refers to no treatment, which was used as a negative control.

[0022] FIG. 2 shows the percentage of activated T cells resulting from treating responder cells with various antibodies and SMIP fusion proteins in a mixed lymphocyte reaction assay. “MLR” refers to mixed lymphocyte reaction without any additional treatment. “Responder only” refers to a reaction where only responder cells were present. “IgG2a” refers to responder cells treated with 10 μg/ml IgG2a mAb.

[0023] FIG. 3 shows the percentage of activated T cells resulting from treating responder cells with various antibodies and SMIP fusion proteins in a mixed lymphocyte reaction assay. “MLR” refers to mixed lymphocyte reaction without any additional treatment. “Responder only” refers to a reaction where only responder cells were present.

[0024] FIG. 4 shows the percentage of activated T cells resulting from treating memory T cells with a monoclonal antibody and various SMIP fusion proteins. “Responder (No TT)” refers to a reaction in the absence of tetanus toxoid.

[0025] FIGS. 5A and 5B are FACS analysis dot plots of TCR and CD3 on human T cells stained (A) immediately after isolation (day 0) or (b) 4 days after treatment with OKT3 monoclonal antibody or various OKT3 SMIP fusion proteins.

[0026] FIGS. 6A and 6B are FACS analysis dot plots of TCR and CD3 on human T cells stained (A) immediately after isolation (day 0) or (B) 4 days after treatment with OKT3 IgG1AA or OKT3 HM1 SMIP fusion proteins.

[0027] FIG. 7 shows changes in fluorescence of a calcium flux indicator dye over time resulting from treating purified human T cells with monoclonal antibodies, combinations of antibodies, or various OKT3 SMIP fusion proteins.

[0028] FIGS. 8A and 8B show (A) IFNγ or (B) IP-10 release after treating ConA-primed mouse T cells with monoclonal antibodies (2C11 mAb and H57 mAb) or SMIP fusion proteins (2C11 Null2 and H57Null2).

[0029] FIG. 9 shows the percentage of activated T cells resulting from treating responder cells with various antibodies or SMIP fusion proteins in a mixed lymphocyte reaction assay. “R only” refers to a reaction having only responder cells present; “S only” refers to a reaction having only stimulator cells present; and “R:S” refers to a reaction having both responder and stimulator cells present.

[0030] FIGS. 10A and 10B show changes in (A) body weights and (B) clinical score over time post intravenous administration of antibody (H57 mAb) and H57Null2 SMIP fusion protein at various concentrations. PBS and IgG2a were used as negative controls.

[0031] FIGS. 11A and 11B show the concentration of (A) IL-6 and (B) IL-4 in serum 2 hours, 24 hours, 72 hours after intravenous administration into normal BALB/c mice of an anti-TCR antibody (H57 mAb) or various concentrations of an anti-TCR SMIP fusion protein (H57Null2). Mouse IgG2a antibody and PBS (diluent) were used as negative controls.

[0032] FIG. 12 shows the percentage of T cells found in a mouse spleen that were coated with H57Null2 SMIP on days 1 or 3 after intravenous administration of various concentrations of an anti-TCR SMIP fusion protein (H57Null2). PBS and IgG2a were used as negative controls.

[0033] FIG. 13 shows the percentage of change of initial body weight of recipient mice over 14 days following the transfer of donor cells in a model of acute Graft versus Host Disease (aGVHD). “Naïve recipient” indicates mice which received no donor cell transfer as a negative control. Recipient mice were treated with H57Null2 SMIP fusion protein, dexamethasone (DEX), or control (PBS or IgG2a).

[0034] FIGS. 14A to 14C show the serum concentration of (A) G-CSF, (B) KC, or (C) IFNγ on day 14, day 14, or day 7, respectively, after transfer of donor cells.

[0035] FIG. 15 shows the donor:host lymphocyte ratio on day 14 after transfer of donor cells. “No cell transfer” indicates a negative control mouse that did not receive donor cells. PBS and IgG2a were used as control treatments.

[0036] FIG. 16 shows sequence alignments among the C_{H2} regions of human IgG1, human IgG2, human IgG4, and mouse IGHG2c (SEQ ID NOS:64, 66, 68 and 73, respectively). The alignments were performed using the Clustal W method with default parameters of the MegAlign program of DNASTAR 5.03 (DNASTAR Inc.). The amino acid positions of human IgG1 C_{H2} are based on the EU numbering according to Kabat (see Kabat, Sequences of Proteins of Immunological Interest, 5^{th} ed. Bethesda, Md.: Public Health Service, National Institutes of Health (1991)). That is, the heavy chain variable region of human IgG1 is deemed to be 128 amino acids in length, so the most amino-terminal amino acid residue in the constant region of human IgG1 is at position 129. The amino acid positions of other C_{H2} regions are indicated based on the positions of the amino acid residues in human IgG1 with which they align. The Asn residues at position 297 (N297) are underlined and in bold.

[0037] FIG. 17 shows the percentage of activated T cells resulting from treating responder cells with either an antibody or a SMIP fusion protein in a mixed lymphocyte reaction (MLR) assay. “R” refers to a reaction where only responder cells were present, “S” refers to a reaction where only stimulator cells were present, “R+S” refers to mixed lymphocyte reaction without any additional treatment, “mulgG2b” refers to responder cells treated with 10 μg/ml mouse IgG2b. “Control SMIP” is a SMIP fusion protein having an scFv binding domain that does not bind to T cells. The cells were tested with Cris-7 IgG1 N297A (SEQ ID NO:265).

[0038] FIG. 18 shows FACS analysis dot plots of TCR and CD3 on human T cells stained immediately after isolation. The top two panels show human T cells treated with Cris-7 monoclonal antibody and the bottom two panels show treatment with Cris-7 IgG1 N297A (SEQ ID NO:265). The panels on the left show cell distributions on the day of treatment (day 0) and the panels on the right show cell distributions 2 days after treatment (day 2).

[0039] FIG. 19 shows changes in fluorescence of a calcium flux indicator dye over time resulting from treatment of human T cells with BC3 IgG1-N297A (SEQ ID NO:80, which has Linker 87 as a hinge between the scFv and the CH2CH3 domains) compared to this same fusion protein having hinge Linker 87 swapped out for other hinges of various lengths (in particular, Linkers 115-120 and 122, which correspond to SEQ ID NOS:212-218, respectively).

[0040] FIG. 20 shows the percentage of activated T cells resulting from treating responder cells with either an antibody or a SMIP fusion protein in a MLR assay. “Control SMIP” refers to a SMIP fusion protein having an scFv binding domain that does not bind T cells. “Responder only” refers to a reaction where only responder cells were present. The numbers in brackets are the sequence identifier numbers of the SMIP fusion proteins.

[0041] FIG. 21 shows the percentage of activated T cells resulting from treating responder cells with BC3 IgG1-N297A SMIP fusion proteins containing various hinge linkers in a MLR assay.

[0042] FIG. 22 shows the percentage of activated T cells resulting from treating responder cells with monoclonal antibody Cris7, chimeric or humanized Cris7 SMIP fusion proteins, or a chimeric BC3 SMIP fusion protein (SEQ ID NO:80) in a MLR assay. “Control SMIP” refers to a SMIP fusion protein having an scFv binding domain that does not bind T cells and “Responder only” refers to a reaction where only responder cells were present. The numbers in brackets are the sequence identifier numbers of the SMIP fusion proteins.

[0043] FIG. 23 shows the percentage of activated T cells resulting from treating responder cells with humanized Cris7 IgG1-N297, IgG2-AA-N297A and IgG4-AA-N297A, and HM1 SMIP fusion proteins or chimeric Cris7 IgG1-N297A and HM1 SMIP fusion proteins in a MLR assay. “Parent mAb” refers to Cris7 mAb and “Control SMIP” refers to a SMIP fusion protein having an scFv binding domain that does not bind T cells.

[0044] FIG. 24 shows the percentage of activated T cells after PHA-primed human T cells were treated with humanized Cris7 (VH3-VL1) IgG1-N297A or humanized Cris7 (VH3-VL2) IgG1-N297A SMIP fusion proteins. “Control SMIP” is a non-T cell binding SMIP fusion protein.

[0045] FIGS. 25A and 25B show the concentration of (A) IFNγ and (B) IL-17 in serum 24 hours (day 1) and 72 hours (day 3) after restimulation of PHA-primed T cells with various humanized and chimeric Cris7 SMIP fusion proteins, BC3 SMIP fusion protein (SEQ ID NO:80), and various antibodies (BC3 mAb, parent Cris7 mAb, and Nuvion FL). The numbers in brackets are the sequence identifier numbers of the SMIP fusion proteins.

[0046] FIGS. 26A to 26H show the level of (A) IFNγ, (B) IL-10, (C) IL-1B, (D) IL-17, (E) IL-4, (F) TNF-α, (G) IL-6, and (H) IL-2 in primary PBMC treated for 24 hours (d1), 48 hours (d2), or 72 hours (d3) with humanized Cris7 (VH3-VL1) IgG4-AA-N297A SMIP fusion protein, humanized Cris7 (VH3-VL2) IgG4-AA-N297A SMIP fusion protein, or Cris7 mAb.

[0047] FIG. 27 shows changes in body weights over time post intravenous administration of IgG2a mAb (411 μg), H57 mAb (5 μg), H57Null2 SMIP fusion protein (300 μg), H57 half null SMIP fusion protein (300 μg), or H57 HM2 SMIP fusion protein (300 μg).

[0048] FIG. 28 shows peripheral blood T cell concentrations 2 hours post intravenous administration of IgG2a mAb, H57 mAb, H57Null2, H57 half null, or H57 HM2 as dosed in FIG. 27.

[0049] FIG. 29 shows peripheral T cell concentrations 72 hours post intravenous administration of IgG2a mAb, H57 mAb, H57Null2, H57 half null, or H57 HM2 as dosed in FIG. 27.

[0050] FIGS. 30A to 30C show the concentration of IL-2 in serum (A) 2 hours, (B) 24 hours, and (C) 72 hours after intravenous administration of IgG2a mAb, H57 mAb, H57Null2, H57 half null, or H57 HM2 as dosed in FIG. 27.

[0051] FIGS. 31A to 31C show the concentration of IL-10 in serum (A) 2 hours, (B) 24 hours, and (C) 72 hours after intravenous administration of IgG2a mAb, H57 mAb, H57Null2, H57 half null, or H57 HM2 as dosed in FIG. 27.

[0052] FIGS. 32A to 32C show the concentration of IP-10 in serum (A) 2 hours, (B) 24 hours, and (C) 72 hours after intravenous administration of IgG2a mAb, H57 mAb, H57Null2, H57 half null, or H57 HM2 as dosed in FIG. 27.

[0053] FIGS. 33A to 33C show the concentration of TNFα in serum (A) 2 hours, (B) 24 hours, and (C) 72 hours after intravenous administration of IgG2a mAb, H57 mAb, H57Null2, H57 half null, or H57 HM2 as dosed in FIG. 27.

[0054] FIGS. 34A to 34C show the concentration of IL-4 in serum (A) 2 hours, (B) 24 hours, and (C) 72 hours after intravenous administration of IgG2a mAb, H57 mAb, H57Null2, H57 half null, or H57 HM2 as dosed in FIG. 27.

[0055] FIGS. 35A to 35C show the concentration of MCP-1 in serum (A) 2 hours, (B) 24 hours, and (C) 72 hours after intravenous administration of IgG2a mAb, H57 mAb, H57Null2, H57 half null, or H57 HM2 as dosed in FIG. 27.

[0056] FIGS. 36A to 36C show the concentration of KC in serum (A) 2 hours, (B) 24 hours, and (C) 72 hours after intravenous administration of IgG2a mAb, H57 mAb, H57Null2, H57 half null, or H57 HM2 as dosed in FIG. 27.

[0057] FIGS. 37A to 37C show the concentrations of IL-17 2 hours (A), 24 hours (B) and 72 hours (C) after intravenous administration of IgG2a, H57 mAb and H57Null2, half null and HM2 SMIPs.

[0058] FIGS. 38A to 38C show the concentration of IP-10 in serum (A) 2 hours, (B) 24 hours, and (C) 72 hours after intravenous administration of IgG2a mAb, H57 mAb, H57Null2, H57 half null, or H57 HM2 as dosed in FIG. 27.

[0059] FIGS. 39A and 39B are graphs of the mean serum concentration versus time for H57-HM2 and H57 half null. The results are expressed as the observed data set and the predicted values calculated by WinNonLin™ software. The Rsq value and Rsq adjusted values are the goodness of fit statistics for the terminal elimination phase, before and after adjusting for the number of points used in the estimation of HL_Lambda z (6.6 and 40.7 hours).

[0060] FIG. 40 shows the concentration of G-CSF in serum 15 minutes, 2 hours, 6 hours, 24 hours and 48 hours post intravenous administration of H57-HM2 or H57Null2 (200 μg each).

[0061] FIG. 41 shows the concentration of IFN-γ in serum 15 minutes, 2 hours, 6 hours, 24 hours and 48 hours post intravenous administration of H57-HM2 or H57Null2 (200 μg each).

[0062] FIG. 42 shows the concentration of IL-2 in serum 15 minutes, 2 hours, 6 hours, 24 hours and 48 hours post intravenous administration of H57-HM2 or H57Null2 (200 μg each).

[0063] FIG. 43 shows the concentration of IL-5 in serum 15 minutes, 2 hours, 6 hours, 24 hours and 48 hours post intravenous administration of H57-HM2 or H57Null2 (200 μg each).

[0064] FIG. 44 shows the concentration of IL-6 in serum 15 minutes, 2 hours, 6 hours, 24 hours and 48 hours post intravenous administration of H57-HM2 or H57Null2 (200 μg each).

[0065] FIG. 45 shows the concentration of IL-10 in serum 15 minutes, 2 hours, 6 hours, 24 hours and 48 hours post intravenous administration of H57-HM2 or H57Null2 (200 μg each).

[0066] FIG. 46 shows the concentration of IL-17 in serum 15 minutes, 2 hours, 6 hours, 24 hours and 48 hours post intravenous administration of H57-HM2 or H57Null2 (200 μg each).

[0067] FIG. 47 shows the concentration of IP-10 in serum 15 minutes, 2 hours, 6 hours, 24 hours and 48 hours post intravenous administration of H57-HM2 or H57Null2 (200 μg each).

[0068] FIG. 48 shows the concentration of KC 15 in serum minutes, 2 hours, 6 hours, 24 hours and 48 hours post intravenous administration of H57-HM2 or H57Null2 (200 μg each).

[0069] FIG. 49 shows the concentration of MCP-1 in serum 15 minutes, 2 hours, 6 hours, 24 hours and 48 hours post intravenous administration of H57-HM2 or H57Null2 (200 μg each).

[0070] FIG. 50 shows the percentage of activated T cells resulting from treating responder cells with H57Null2, H57 half null, H57-HM2, mouse IgG2a mAb, or H57 mAb.

[0071] FIG. 51 shows the percentage of activated T cells resulting from treating responder cells with H57Null2, H57 half null, H57-HM2, or H57 mAb normalized to (R+S)−without treatment=100%.

[0072] FIG. 52 shows the percentage of ConA-primed T cells activated by treatments of H57Null2, H57 half null, H57-HM2, mouse IgG2a mAb, H57 mAb, or 2C11 mAb.

### DETAILED DESCRIPTION

[0073] The present disclosure provides fusion proteins containing one or more binding domains directed against the TCR complex in the form of small modular immunopharmaceutical (SMIP™) products or in the form of a SMIP molecule SMIP molecule with Fc and binding domain in the reverse N-terminal to C-terminal orientation (PIMS) that induce a unique T cell signaling profile. This signaling profile is characterized by an undetectable or small, minimal, or nominal cytokine release (i.e., absence of or minimal cytokine storm), induction of calcium flux, phosphorylation of TCR signaling proteins without activating T cells, or any combination thereof. Such a signaling profile is not replicated using monoclonal antibodies, demonstrating an unexpected signaling signature caused by the binding of SMIP or PIMS proteins to their targets. To date, protein molecules directed against the TCR complex either induce a strong T cell signal (e.g., cytokine storm) together with T cell activation or have little effect on cells in the absence of cross-linking.

[0074] Furthermore, this disclosure provides nucleic acid molecules that encode such fusion proteins, as well as vectors and host cells for recombinantly producing such proteins, and compositions and methods for using the fusion proteins of this disclosure in various therapeutic applications, including the treatment as well as the amelioration of at least one symptom of a disease or condition (e.g., an autoimmune disease, inflammatory disease, and organ transplant rejection).

[0075] Prior to setting forth this disclosure in more detail, it may be helpful to an understanding thereof to provide definitions of certain terms to be used herein. Additional definitions are set forth throughout this disclosure.

[0076] In the present description, any concentration range, percentage range, ratio range, or integer range is to be understood to include the value of any integer within the recited range and, when appropriate, fractions thereof (such as one tenth and one hundredth of an integer), unless otherwise indicated. Also, any number range recited herein relating to any physical feature, such as polymer subunits, size or thickness, are to be understood to include any integer within the recited range, unless otherwise indicated. As used herein, “about” or “consisting essentially of” means±20% of the indicated range, value, or structure, unless otherwise indicated. As used herein, the terms “include” and “comprise” are used synonymously. It should be understood that the terms “a” and “an” as used herein refer to “one or more” of the enumerated components. The use of the alternative (e.g., “or”) should be understood to mean either one, both, or any combination thereof of the alternatives. In addition, it should be understood that the individual compounds, or groups of compounds, derived from the various combinations of the structures and substituents described herein, are disclosed by the present application to the same extent as if each compound or group of compounds was set forth individually. Thus, selection of particular structures or particular substituents is within the scope of the present invention.

[0077] The amino acid residues in immunoglobulin C_{H2} and C_{H3} regions of the present disclosure are numbered by the EU numbering system unless otherwise indicated (see, Kabat et al., Sequences of Proteins of Immunological Interest, 5^{th} ed. Bethesda, Md.: Public Health Service, National Institutes of Health (1991)).

[0078] A “small modular immunopharmaceutical (SMIP™) protein” refers to a single chain fusion protein that comprises from its amino to carboxy terminus: a binding domain that specifically binds a target molecule, a linker polypeptide (e.g., an immunoglobulin hinge or derivative thereof), an immunoglobulin C_{H2} polypeptide and an immunoglobulin C_{H3} polypeptide (see, U.S. Patent Publication Nos. 2003/0133939, 2003/0118592, and 2005/0136049).

[0079] A “PIMS protein” is a reverse SMIP molecule wherein the binding domain is disposed at the carboxy-terminus of the fusion protein. Constructs and methods for making PIMS proteins are described in PCT Publication No. WO 2009/023386. In general, a PIMS molecule is a single-chain polypeptide comprising, in amino-terminal to carboxy-terminal orientation, an optional C_{H2} region polypeptide a C_{H3} domain, a linker peptide (e.g., an immunoglobulin hinge region), and a specific binding domain.

[0080] As used herein, a protein “consists essentially of” several domains (e.g., a binding domain that specifically binds a TCR complex or a component thereof, a linker polypeptide, an immunoglobulin C_{H2} region, and an immunoglobulin C_{H3} region) if the other portions of the protein (e.g., amino acids at the amino- or carboxy-terminus or between two domains), in combination, contribute to at most 20% (e.g., at most 15%, 10%, 8%, 6%, 5%, 4%, 3%, 2% or 1%) of the length of the protein and do not substantially affect (i.e., do not reduce the activity by more than 50%, such as more than 40%, 30%, 25%, 20%, 15%, 10%, or 5%) the activities of the protein, such as the affinity to a TCR complex or a component thereof, the ability to not induce (or induce a minimally detectable) cytokine release, the ability to induce calcium flux or phosphorylation of a molecule in the T cell receptor signaling pathway, the ability to block T cell response to an alloantigen, the ability to block memory T cell response to an antigen, and down-modulating the TCR complex of the cell. In certain embodiments, a fusion protein consists essentially of a binding domain that specifically binds a TCR complex or a component thereof, a linker polypeptide, an optional immunoglobulin C_{H2} region polypeptide, and an immunoglobulin C_{H3} region polypeptide. Such molecules may further comprise junction amino acids at the amino- or carboxy-terminus of the protein or between two different domains (e.g., between the binding domain and the linker polypeptide, between the linker polypeptide and the immunoglobulin C_{H2} region polypeptide, or between the immunoglobulin C_{H2} region polypeptide and the immunoglobulin C_{H3} region polypeptide).

[0081] Terms understood by those in the art of antibody technology are each given the meaning acquired in the art, unless expressly defined differently herein. Antibodies are known to have variable regions, a hinge region, and constant domains. Immunoglobulin structure and function are reviewed, for example, in Harlow et al., Eds., Antibodies: A Laboratory Manual, Chapter 14 (Cold Spring Harbor Laboratory, Cold Spring Harbor, 1988). For example, the terms “VL” and “VH” refer to the variable binding region from an antibody light and heavy chain, respectively. The variable binding regions are made up of discrete, well-defined sub-regions known as “complementarity determining regions” (CDRs) and “framework regions” (FRs). The term “CL” refers to an “immunoglobulin light chain constant region” or a “light chain constant region,” i.e., a constant region from an antibody light heavy chain. The term “CH” refers to an “immunoglobulin heavy chain constant region” or a “heavy chain constant region,” which is further divisible, depending on the antibody isotype into C_{H1}, C_{H2}, and C_{H3} (IgA, IgD, IgG), or C_{H1}, C_{H2}, C_{H3}, and C_{H4} domains (IgE, IgM). A portion of the constant region domains make up the Fc region (the “fragment crystallizable” region) from an antibody and is responsible for the effector functions of an immunoglobulin, such as ADCC (antibody-dependent cell-mediated cytotoxicity), ADCP (antibody-dependent cellular phagocytosis), CDC (complement-dependent cytotoxicity) and complement fixation, binding to Fc receptors (e.g., CD16, CD32, FcRn), greater half-life in vivo relative to a polypeptide lacking an Fc region, protein A binding, and perhaps even placental transfer (see Capon et al., Nature, 337:525 (1989)).

[0082] In addition, antibodies have a hinge sequence that is typically situated between the Fab and Fc region (but a lower section of the hinge may include an amino-terminal portion of the Fc region). By way of background, an immunoglobulin hinge acts as a flexible spacer to allow the Fab portion to move freely in space. In contrast to the constant regions, hinges are structurally diverse, varying in both sequence and length between immunoglobulin classes and even among subclasses. For example, a human IgG1 hinge region is freely flexible, which allows the Fab fragments to rotate about their axes of symmetry and move within a sphere centered at the first of two inter-heavy chain disulfide bridges. By comparison, a human IgG2 hinge is relatively short and contains a rigid poly-proline double helix stabilized by four inter-heavy chain disulfide bridges, which restricts the flexibility. A human IgG3 hinge differs from the other subclasses by its unique extended hinge region (about four times as long as the IgG1 hinge), containing 62 amino acids (including 21 prolines and 11 cysteines), forming an inflexible poly-proline double helix and providing greater flexibility because the Fab fragments are relatively far away from the Fc fragment. A human IgG4 hinge is shorter than IgG1 but has the same length as IgG2, and its flexibility is intermediate between that of IgG1 and IgG2.

[0083] According to crystallographic studies, an IgG hinge domain can be functionally and structurally subdivided into three regions: the upper, the core or middle, and the lower hinge regions (Shin et al., Immunological Reviews 130:87 (1992)). Exemplary upper hinge regions include EPKSCDKTHT (SEQ ID NO:359) as found in IgG1, ERKCCVE (SEQ ID NO:360) as found in IgG2, ELKTPLGDTT HT (SEQ ID NO:361) or EPKSCDTPPP (SEQ ID NO:362) as found in IgG3, and ESKYGPP (SEQ ID NO:363) as found in IgG4. Exemplary middle or core hinge regions include CPPCP (SEQ ID NO:364) as found in IgG1 and IgG2, CPRCP (SEQ ID NO:365) as found in IgG3, and CPSCP (SEQ ID NO:366) as found in IgG4. While IgG1, IgG2, and IgG4 antibodies each appear to have a single upper and middle hinge, IgG3 has four in tandem—one being ELKTPLGDTTHTCPRCP (SEQ ID NO:367) and three being EPKSCDTPPPCPRCP (SEQ ID NO:368).

[0084] IgA and IgD antibodies appear to lack an IgG-like core region, and IgD appears to have two upper hinge regions in tandem (see, ESPKAQASSVPTAQPQAEGSLAKATTAPATTRNT (SEQ ID NO:369) and GRGGEEKKKEKEKEEQEERETKTP (SEQ ID NO:370). Exemplary wild type upper hinge regions found in IgA1 and IgA2 antibodies are VPSTPPTPSPSTPPTPSPS (SEQ ID NO:371) and VPPPPP (SEQ ID NO:372), respectively.

[0085] IgE and IgM antibodies, in contrast, lack a typical hinge region and instead have a C_{H2} domain with hinge-like properties. Exemplary wild-type C_{H2} upper hinge-like sequences of IgE and IgM are set forth in SEQ ID NO:373 (VCSRDFTPPTVKILQSSSDGGGHFPPTIQLLCLVSGYTPGTINITWLEDG QVMDVDLSTASTTQEGELASTQSELTLSQKHWLSDRTYTCQVTYQGHTFE DSTKKCA) and SEQ ID NO:374 (VIAELPPKVSVFVPPRDGFFGNPRKSKLIC QATGFSPRQIQVSWLREGKQVGSGVTTDQVQAEAKESGPTTYKVTSTLTI KESDWLGQSMFTCRVDHRGLTFQQNASSMCVP), respectively.

[0086] As used herein, a “hinge region” or a “hinge” refers to (a) an immunoglobulin hinge region (made up of, for example, upper and core regions) or a functional variant thereof, (b) a lectin interdomain region or a functional variant thereof, or (c) a cluster of differentiation (CD) molecule stalk region or a functional variant thereof.

[0087] An immunoglobulin hinge region may be a wild type immunoglobulin hinge region or an altered wild type immunoglobulin hinge region or altered immunoglobulin hinge region.

[0088] As used herein, a “wild type immunoglobulin hinge region” refers to a naturally occurring upper and middle hinge amino acid sequences interposed between and connecting the C_{H1} and C_{H2} domains (for IgG, IgA, and IgD) or interposed between and connecting the C_{H1} and C_{H3} domains (for IgE and IgM) found in the heavy chain of an antibody.

[0089] An “altered wild type immunoglobulin hinge region” or “altered immunoglobulin hinge region” refers to (a) a wild type immunoglobulin hinge region with up to 30% amino acid changes (e.g., up to 25%, 20%, 15%, 10%, or 5% amino acid substitutions or deletions), or (b) a portion of a wild type immunoglobulin hinge region that has a length of about 5 amino acids (e.g., about 5, 6, 7, 8, 9, 10, 11, 12, 13, 14, 15, 16, 17, 18, 19, or 20 amino acids) up to about 120 amino acids (preferably having a length of about 10 to about 40 amino acids or about 15 to about 30 amino acids or about 15 to about 20 amino acids or about 20 to about 25 amino acids), has up to about 30% amino acid changes (e.g., up to about 25%, 20%, 15%, 10%, 5%, 4%, 3%, 2%, or 1% amino acid substitutions or deletions or a combination thereof), and has an IgG core hinge region as set forth in SEQ ID NOS:364, 365, or 366.

[0090] A “variable domain linking sequence” is an amino acid sequence that connects a heavy chain variable region to a light chain variable region and provides a spacer function compatible with interaction of the two sub-binding domains so that the resulting polypeptide retains a specific binding affinity to the same target molecule as an antibody that comprises the same light and heavy chain variable regions. In certain embodiments, a hinge useful for linking a binding domain to an immunoglobulin C_{H2} or C_{H3} region polypeptide may be used as a variable domain linking sequence.

[0091] A “linker polypeptide” refers to an amino acid sequence that links a binding domain to an immunoglobulin C_{H2} or C_{H3} region polypeptide in a fusion protein. In certain embodiments, the linker polypeptide is a hinge as defined herein. In certain embodiments, a variable domain linking sequence useful for connecting a heavy chain variable region to a light chain variable region may be used as a linker polypeptide.

[0092] In certain embodiments, there may be one or a few (e.g., 2-8) amino acid residues between two domains of a fusion protein, such as between a binding domain and a linker polypeptide, between a linker polypeptide and an immunoglobulin C_{H2} region polypeptide, and between an immunoglobulin C_{H2} region polypeptide and an immunoglobulin C_{H3} region polypeptide, such as amino acid residues resulting from construct design of the fusion protein (e.g., amino acid residues resulting from the use of a restriction enzyme site during the construction of a nucleic acid molecule encoding a single chain polypeptide). As described herein, such amino acid residues may be referred to “junction amino acids” or “junction amino acid residues.”

[0093] “Derivative” as used herein refers to a chemically or biologically modified version of a compound (e.g., a protein) that is structurally similar to a parent compound and (actually or theoretically) derivable from that parent compound.

[0094] As used herein, “amino acid” refers to a natural amino acid (those occurring in nature), a substituted natural amino acid, a non-natural amino acid, a substituted non-natural amino acid, or any combination thereof. The designations for natural amino acids are herein set forth as either the standard one- or three-letter code. Natural polar amino acids include asparagine (Asp or N) and glutamine (Gln or Q); as well as basic amino acids such as arginine (Arg or R), lysine (Lys or K), histidine (His or H), and derivatives thereof; and acidic amino acids such as aspartic acid (Asp or D) and glutamic acid (Glu or E), and derivatives thereof. Natural hydrophobic amino acids include tryptophan (Trp or W), phenylalanine (Phe or F), isoleucine (Ile or I), leucine (Leu or L), methionine (Met or M), valine (Val or V), and derivatives thereof; as well as other non-polar amino acids such as glycine (Gly or G), alanine (Ala or A), proline (Pro or P), and derivatives thereof. Natural amino acids of intermediate polarity include serine (Ser or S), threonine (Thr or T), tyrosine (Tyr or Y), cysteine (Cys or C), and derivatives thereof. Unless specified otherwise, any amino acid described herein may be in either the D- or L-configuration.

[0095] Amino acids can be classified according to physical properties and contribution to secondary and tertiary protein structure. A “conservative substitution” is recognized in the art as a substitution of one amino acid for another amino acid that has similar properties. Exemplary conservative substitutions are well known in the art (see, e.g., WO 97/09433, page 10, published Mar. 13, 1997; Lehninger, Biochemistry, Second Edition; Worth Publishers, Inc. NY:NY (1975), pp. 71-77; Lewin, Genes IV, Oxford University Press, NY and Cell Press, Cambridge, Mass. (1990), p. 8. In certain embodiments, a conservative substitution includes a leucine to serine substitution.

[0096] As used herein, unless otherwise provided, a position of an amino acid residue in the constant region of human IgG1 heavy chain is numbered assuming that the variable region of human IgG1 is composed of 128 amino acid residues according to the Kabat numbering convention. The numbered constant region of human IgG1 heavy chain is then used as a reference for numbering amino acid residues in constant regions of other immunoglobulin heavy chains. A position of an amino acid residue of interest in a constant region of an immunoglobulin heavy chain other than human IgG1 heavy chain is the position of the amino acid residue in human IgG1 heavy chain with which the amino acid residue of interest aligns. Alignments between constant regions of human IgG1 heavy chain and other immunoglobulin heavy chains may be performed using software programs known in the art, such as the Megalign program (DNASTAR Inc.) using the Clustal W method with default parameters. Exemplary sequence alignments are shown in FIG. 16. According to the numbering system described herein, although human IgG2 C_{H2} region has an amino acid deletion near its amino-terminus compared with other C_{H2} regions in FIG. 16, the position of the underlined “N” in human IgG2 C_{H2} is still position 297, because this residue aligns with “N” at position 297 in human IgG1 C_{H2}.

### Fusion Proteins Directed Against TCR Complex

[0097] In one aspect, the present disclosure provides a single chain fusion protein in the form of a SMIP fusion protein that comprises, consists essentially of, or consists of, from its amino-terminus to its carboxy-terminus: (a) a binding domain that specifically binds to a TCR complex or a component thereof, (b) a linker polypeptide, (c) optionally an immunoglobulin C_{H2} region polypeptide, and (d) an immunoglobulin C_{H3} region polypeptide. The immunoglobulin C_{H2} region polypeptide when present may comprise (1) an amino acid substitution at the asparagine of position 297; (2) one or more amino acid substitutions or deletions at positions 234-238; (3) at least one amino acid substitution or deletion at positions 253, 310, 318, 320, 322, or 331; (4) an amino acid substitution at the asparagine of position 297 and one or more substitutions or deletions at positions 234-238; (5) an amino acid substitution at the asparagine of position 297 and one or more substitutions or deletions at positions 253, 310, 318, 320, 322, or 331; (6) one or more amino acid substitutions or deletions at positions 234-238, 253, 310, 318, 320, 322, or 331; or (7) an amino acid substitution at the asparagine of position 297 and at least one amino acid substitution or deletion at positions 234-238, 253, 310, 318, 320, 322, or 331.

[0098] In preferred embodiments, a single chain fusion protein of this disclosure will comprise, consist essentially of, or consist of, from its amino-terminus to its carboxy-terminus: (a) a binding domain that specifically binds to a TCR complex or a component thereof, (b) a linker polypeptide, (c) an immunoglobulin C_{H2} region polypeptide, and (d) an immunoglobulin C_{H3} region polypeptide, wherein the immunoglobulin C_{H2} region polypeptide comprises (i) an amino acid substitution at the asparagine of position 297 and one or more substitutions or deletions at positions 234-238; (ii) an amino acid substitution at the asparagine of position 297, a substitution at positions 234, 235, and 237, and a deletion at position 236; (iii) at least one amino acid substitution or deletion at positions 234-238, 253, 310, 318, 320, 322, or 331; (iv) an amino acid substitution at positions 234, 235, 237, 318, 320, and 322, and a deletion at position 236; (v) an amino acid substitution at the asparagine of position 297 and at least one substitution or deletion at positions 234-238, 253, 310, 318, 320, 322, or 331; or (vi) an amino acid substitution at the asparagine of position 297, an amino acid substitution at positions 234, 235, 237, 318, 320, and 322, and a deletion at position 236. In each of these preferred embodiments, the amino acid used in the substation is preferably alanine or serine.

[0099] In further preferred embodiments, a single chain fusion protein of this disclosure will comprise, consist essentially of, or consist of, from its amino-terminus to its carboxy-terminus: (a) a binding domain that specifically binds to a TCR complex or a component thereof, (b) a linker polypeptide, and (c) an immunoglobulin C_{H3} region polypeptide, wherein the immunoglobulin C_{H3} region polypeptide comprises a C_{H3} region of human IgM and a C_{H3} region of human IgG (preferably IgG1).

[0100] The fusion proteins will only undetectably, nominally, minimally, or at a low level induce cytokine release (i.e., cytokine storm), or will activate T cells, and may additionally be capable of one or more of the following activities: (1) inducing calcium flux, (2) inducing phosphorylation of molecules in the TCR signaling pathway, (3) blocking T cell response to an alloantigen, (4) blocking memory T cell response to an antigen, and (5) downmodulating the TCR complex.

[0101] In a preferred embodiment, the fusion protein comprises an amino acid sequence as set forth in SEQ ID NO:293, 294, 298, or 299. In related preferred embodiments, the hinge sequence at amino acids 247 to 261 of SEQ ID NOS:293, 294, 298, and 299 is replaced with a hinge amino acid sequence as set forth in SEQ ID NOS:379-434. In further preferred embodiments, the immunoglobulin C_{H2} region polypeptide of SEQ ID NOS:293, 294, 298, and 299 further comprises amino acid substitutions at positions 318, 320, and 322 according to EU numbering.

[0102] In a related aspect, the present disclosure provides a single chain fusion protein in the form of a PIMS protein that comprises, consists essentially of, or consists of, from its amino-terminus to its carboxy-terminus: (a) optionally an immunoglobulin C_{H2} region polypeptide, (b) an immunoglobulin C_{H3} region polypeptide, (c) a linker polypeptide, and (d) a binding domain that specifically binds to a TCR complex or a component thereof. The immunoglobulin C_{H2} region polypeptide when present may comprise the same types of mutations as in the SMIP fusion proteins provided herein. In addition, the PIMS proteins will have one or more of the desirable biological activities that a SMIP fusion protein, as described herein, has.

[0103] Binding Domain

[0104] As described herein, a fusion protein of the present disclosure comprises a binding domain that specifically binds to a TCR complex or a component thereof (such as CD3, TCRα, TCRβ, or any combination thereof).

[0105] A “binding domain” or “binding region” according to the present disclosure may be, for example, any protein, polypeptide, oligopeptide, or peptide that possesses the ability to specifically recognize and bind to a biological molecule (e.g., a TCR complex or a component thereof). A binding domain includes any naturally occurring, synthetic, semi-synthetic, or recombinantly produced binding partner for a biological molecule of interest. For example, a binding domain may be antibody light chain and heavy chain variable domain regions, or the light and heavy chain variable domain regions can be joined together in a single chain and in either orientation (e.g., VL-VH or VH-VL). A variety of assays are known for identifying binding domains of the present disclosure that specifically bind with a particular target, including Western blot, ELISA, flow cytometry, or Biacore™ analysis.

[0106] A binding domain (or a fusion protein thereof) “specifically binds” to a target molecule if it binds to or associates with a target molecule with an affinity or Ka (i.e., an equilibrium association constant of a particular binding interaction with units of 1/M) of, for example, greater than or equal to about 10⁵ M⁻¹. In certain embodiments, a binding domain (or a fusion protein thereof) binds to a target with a Ka greater than or equal to about 10⁶ M⁻¹, 10⁷ M⁻¹, 10⁸ M⁻¹, 10⁹ M⁻¹, 10¹⁰ M⁻¹, 10¹¹ M⁻¹, 10¹² M⁻¹, or 10¹³ M⁻¹. “High affinity” binding domains (or single chain fusion proteins thereof) refers to those binding domains with a Kₐ of at least 10⁷ M⁻¹, at least 10⁸ M⁻¹, at least 10⁹ M⁻¹, at least 10¹⁰ M⁻¹, at least 10¹¹ M⁻¹, at least 10¹² M⁻¹, at least 10¹³ M⁻¹, or greater. Alternatively, affinity may be defined as an equilibrium dissociation constant (K_{d}) of a particular binding interaction with units of M (e.g., 10⁻⁵ M to 10⁻¹³ M, or less). Affinities of binding domain polypeptides and fusion proteins according to the present disclosure can be readily determined using conventional techniques (see, e.g., Scatchard et al. (1949) Ann. N.Y. Acad. Sci. 51:660; and U.S. Pat. Nos. 5,283,173; 5,468,614, or the equivalent).

[0107] “T cell receptor” (TCR) is a molecule found on the surface of T cells that, along with CD3, is generally responsible for recognizing antigens bound to major histocompatibility complex (MHC) molecules. It consists of a disulfide-linked heterodimer of the highly variable α and β chains in most T cells. In other T cells, an alternative receptor made up of variable γ and δ chains is expressed. Each chain of the TCR is a member of the immunoglobulin superfamily and possesses one N-terminal immunoglobulin variable domain, one immunoglobulin constant domain, a transmembrane region, and a short cytoplasmic tail at the C-terminal end (see, Abbas and Lichtman, Cellular and Molecular Immunology (5th Ed.), Editor: Saunders, Philadelphia, 2003; Janeway et al., Immunobiology: The Immune System in Health and Disease, 4^{th} Ed., Current Biology Publications, p148, 149, and 172, 1999). TCR as used in the present disclosure may be from various animal species, including human, mouse, rat, or other mammals.

[0108] “Anti-TCR fusion protein, SMIP, or antibody” refers to a fusion protein, SMIP, or antibody that specifically binds to a TCR molecule or one of its individual chains (e.g., TCR α, TCRβ, TCRγ or TCRδ chain). In certain embodiments, an anti-TCR fusion protein, SMIP, or antibody specifically binds to a TCR α, a TCRβ, or both.

[0109] “CD3” is known in the art as a multi-protein complex of six chains (see, Abbas and Lichtman, 2003; Janeway et al., p172 and 178, 1999). In mammals, the complex comprises a CD3γ chain, a CD3δ chain, two CD3ε chains, and a homodimer of CD3ζ chains. The CD3γ, CD3δ, and CD3ε chains are highly related cell surface proteins of the immunoglobulin superfamily containing a single immunoglobulin domain. The transmembrane regions of the CD3γ, CD3δ, and CD3ε chains are negatively charged, which is a characteristic that allows these chains to associate with the positively charged T cell receptor chains. The intracellular tails of the CD3γ, CD3δ, and CD3ε chains each contain a single conserved motif known as an immunoreceptor tyrosine-based activation motif or ITAM, whereas each CD3 chain has three. Without wishing to be bound by theory, it is believed the ITAMs are important for the signaling capacity of a TCR complex. CD3 as used in the present disclosure may be from various animal species, including human, mouse, rat, or other mammals.

[0110] “Anti-CD3 fusion protein, SMIP, or antibody,” as used herein, refers to a fusion protein, SMIP, or antibody that specifically binds to individual CD3 chains (e.g., CD3γ chain, CD3δ chain, CD3ε chain) or a complex formed from two or more individual CD3 chains (e.g., a complex of more than one CD3ε chains, a complex of a CD3γ and CD3ε chain, a complex of a CD3δ and CD3ε chain). In certain preferred embodiments, an anti-CD3 fusion protein, SMIP, or antibody specifically binds to a CD3γ, a CD3δ, a CD3ε, or any combination thereof, and more preferably a CD3ε.

[0111] “TCR complex,” as used herein, refers to a complex formed by the association of CD3 with TCR. For example, a TCR complex can be composed of a CD3γ chain, a CD3δ chain, two CD3ε chains, a homodimer of CD3ζ chains, a TCRα chain, and a TCRβ chain. Alternatively, a TCR complex can be composed of a CD3γ chain, a CD3δ chain, two CD3ε chains, a homodimer of CD3ζ chains, a TCRγ chain, and a TCRδ, chain.

[0112] “A component of a TCR complex,” as used herein, refers to a TCR chain (i.e., TCRα, TCRβ, TCRγ or TCRδ), a CD3 chain (i.e., CD3γ, CD3δ, CD3ε or CD3δ), or a complex formed by two or more TCR chains or CD3 chains (e.g., a complex of TCRα and TCRβ, a complex of TCRγ and TCRδ, a complex of CD3ε and CD3δ, a complex of CD3γ and CD3ε, or a sub-TCR complex of TCRα, TCRβ, CD3γ, CD3δ, and two CD3ε chains).

[0113] By way of background, the TCR complex is generally responsible for initiating a T cell response to antigen bound to MHC molecules. It is believed that binding of a peptide:MHC ligand to the TCR and a co-receptor (i.e., CD4 or CD8) brings together the TCR complex, the co-receptor, and CD45 tyrosine phosphatase. This allows CD45 to remove inhibitory phosphate groups and thereby activate Lck and Fyn protein kinases. Activation of these protein kinases leads to phosphorylation of the ITAM on the CD3ζ chains, which in turn renders these chains capable of binding the cytosolic tyrosine kinase ZAP-70. The subsequent activation of bound ZAP-70 by phosphorylation triggers three signaling pathways, two of which are initiated by the phosphorylation and activation of PLC-γ, which then cleaves phoshatidylinositol phosphates (PIPs) into diacylglycerol (DAG) and inositol trisphosphate (IP₃). Activation of protein kinase C by DAG leads to activation of the transcription factor NFκB. The sudden increase in intracellular free Ca²⁺ as a result of IP₃ action activates a cytoplasmic phosphatase, calcineurin, which enables the transcription factor NFAT (nuclear factor of activated T cells) to translocate form the cytoplasm to the nucleus. Full transcriptional activity of NFAT also requires a member of the AP-1 family of transcription factors; dimers of members of the Fos and Jun families of transcription regulators. A third signaling pathway initiated by activated ZAP-70 is the activation of Ras and subsequent activation of a MAP kinase cascade. This culminates in the activation of Fos and hence of the AP-1 transcription factors. Together, NFκB, NFAT, and AP-1 act on the T cell chromosomes, initiating new gene transcription that results in the differentiation, proliferation and effector actions of T cells. See, Janeway et al., p178, 1999.

[0114] In certain embodiments, a binding domain of the present disclosure specifically binds to an individual CD3 chain (e.g., CD3γ, CD3δ, or CD3ε) or a combination of two or more of the individual CD3 chains (e.g., a complex formed from CD3γ and CD3ε or a complex formed from CD3δ and CD3ε). In certain embodiments, the binding domain specifically binds to an individual human CD3 chain (e.g., human CD3γ chain, human CD3δ chain, and human CD3ε chain) or a combination of two or more of the individual human CD3 chains (e.g., a complex of human CD3γ and human CD3ε or a complex of human CD3δ and human CD3ε). In certain preferred embodiments, the binding domain specifically binds to a human CD3ε chain.

[0115] In certain other embodiments, a binding domain of the present disclosure specifically binds to TCRα, TCRβ, or a heterodimer formed from TCRα and TCRβ. In certain preferred embodiments, a binding domain specifically binds to one or more of human TCRα, human TCRβ, or a heterodimer formed from human TCRα and human TCRβ.

[0116] In certain embodiments, a binding domain of the present disclosure binds to a complex formed from one or more CD3 chains with one or more TCR chains, such as a complex formed from a CD3γ chain, a CD3δ chain, a CD3ε chain, a TCRα chain, or a TCR chain, or any combination thereof. In other embodiments, a binding domain of the present disclosure binds to a complex formed from one CD3γ chain, one CD3δ chain, two CD3ε chains, one TCRα chain, and one TCRβ chain. In further preferred embodiments, a binding domain of the present disclosure binds to a complex formed from one or more human CD3 chains with one or more human TCR chains, such as a complex formed from a human CD3γ chain, a human CD3δ chain, a human CD3ε, a human TCRα chain, or a human TCRβ chain, or any combination thereof. In certain embodiments, a binding domain of the present disclosure binds to a complex formed from one human CD3γ chain, one human CD3δ chain, two human CD3ε chains, one human TCRα chain, and one human TCRβ chain.

[0117] Binding domains of this disclosure can be generated as described herein or by a variety of methods known in the art (see, e.g., U.S. Pat. Nos. 6,291,161; 6,291,158). Sources of binding domains include antibody variable domain nucleic acid sequences from various species (which can be formatted as antibodies, sFvs, scFvs or Fabs, such as in a phage library), including human, camelid (from camels, dromedaries, or llamas; Hamers-Casterman et al. (1993) Nature, 363:446 and Nguyen et al. (1998) J. Mol. Biol., 275:413), shark (Roux et al. (1998) Proc. Nat'l. Acad. Sci. (USA) 95:11804), fish (Nguyen et al. (2002) Immunogenetics, 54:39), rodent, avian, or ovine. Exemplary anti-CD3 antibodies from which the binding domain of this disclosure may be derived include Cris-7 monoclonal antibody (Reinherz, E. L. et al. (eds.), Leukocyte typing II., Springer Verlag, New York, (1986)), BC3 monoclonal antibody (Anasetti et al. (1990) J. Exp. Med. 172:1691), OKT3 (Ortho multicenter Transplant Study Group (1985) N. Engl. J. Med. 313:337) and derivatives thereof such as OKT3 ala-ala (Herold et al. (2003) J. Clin. Invest. 11:409), visilizumab (Carpenter et al. (2002) Blood 99:2712), and 145-2C11 monoclonal antibody (Hirsch et al. (1988) J. Immunol. 140: 3766). An exemplary anti-TCR antibody is H57 monoclonal antibody (Lavasani et al. (2007) Scandinavian Journal of Immunology 65:39-47).

[0118] An alternative source of binding domains of this disclosure includes sequences that encode random peptide libraries or sequences that encode an engineered diversity of amino acids in loop regions of alternative non-antibody scaffolds, such as fibrinogen domains (see, e.g., Weisel et al. (1985) Science 230:1388), Kunitz domains (see, e.g., U.S. Pat. No. 6,423,498), lipocalin domains (see, e.g., WO 2006/095164), V-like domains (see, e.g., US Patent Application Publication No. 2007/0065431), C-type lectin domains (Zelensky and Gready (2005) FEBS J. 272:6179), mAb² or Fcab™ (see, e.g., PCT Patent Application Publication Nos. WO 2007/098934; WO 2006/072620), or the like. For example, binding domains of this disclosure may be identified by screening a Fab phage library for Fab fragments that specifically bind to a CD3 chain (see Hoet et al. (2005) Nature Biotechnol. 23:344).

[0119] Additionally, traditional strategies for hybridoma development using a CD3 chain as an immunogen in convenient systems (e.g., mice, HuMAb mouse®, TC mouse™, KM-mouse®, llamas, chicken, rats, hamsters, rabbits, etc.) can be used to develop binding domains of this disclosure.

[0120] In some embodiments, a binding domain is a single chain Fv fragment (scFv) that comprises V_{H} and V_{L} domains specific for a TCR complex or a component thereof. In preferred embodiments, the V_{H} and V_{L} domains are human or humanized V_{H} and V_{L} domains. Exemplary V_{H} domains include BC3 V_{H}, OKT3 V_{H}, H57 V_{H}, and 2C11 V_{H} domains as set forth in SEQ ID NOS:2, 6, 49 and 58, respectively. Further exemplary V_{H} domains include Cris-7 V_{H} domains, such as those set forth in SEQ ID NOS:220, 243, 244, and 245. Exemplary V_{L} domains are BC3 V_{L}, OKT3 V_{L}, H57 V_{L}, and 2C11 V_{L} domains as set forth in SEQ ID NOS:4, 8, 51 and 60, respectively. Further exemplary V_{L} domains include Cris-7 V_{L} domains, such as those set forth in SEQ ID NOS:222, 241, and 242. In certain embodiments, a binding domain comprises or is a sequence that is at least 90%, at least 91%, at least 92%, at least 93%, at least 94%, at least 95%, at least 96%, at least 97%, at least 98%, at least 99%, at least 99.5%, or 100% identical to an amino acid sequence of a light chain variable region (V_{L}) (e.g., SEQ ID NO:4, 8, 51, 60, 222, 241, or 242) or to a heavy chain variable region (V_{H}) (e.g., SEQ ID NO:2, 6, 49, 58, 220, 243, 244, or 245), or both from a monoclonal antibody or fragment or derivative thereof that specifically binds to a TCR complex or a component thereof, such as CD3ε, TCRα, TCRβ, TCRγ and TCRδ, or a combination thereof.

[0121] “Sequence identity,” as used herein, refers to the percentage of amino acid residues in one sequence that are identical with the amino acid residues in another reference polypeptide sequence after aligning the sequences and introducing gaps, if necessary, to achieve the maximum percent sequence identity, and not considering any conservative substitutions as part of the sequence identity. The percentage sequence identity values can be generated using the NCBI BLAST2.0 software as defined by Altschul et al. (1997) “Gapped BLAST and PSI-BLAST: a new generation of protein database search programs”, Nucleic Acids Res. 25:3389-3402, with the parameters set to default values.

[0122] In certain embodiments, a binding domain V_{H} region of the present disclosure can be derived from or based on a V_{H} of a known monoclonal antibody (e.g., Cris-7, BC3, OKT3, including derivatives thereof) and contains one or more insertions, one or more deletions, one or more amino acid substitutions (e.g., conservative amino acid substitutions or non-conservative amino acid substitutions), or a combination of the above-noted changes, when compared with the V_{H} of a known monoclonal antibody. The insertion(s), deletion(s) or substitution(s) may be anywhere in the V_{H} region, including at the amino- or carboxy-terminus or both ends of this region, provided a binding domain containing the modified V_{H} region can still specifically bind its target with an affinity similar to the wild type binding domain.

[0123] In certain embodiments, a V_{L} region in a binding domain of the present disclosure is derived from or based on a V_{L} of a known monoclonal antibody (e.g., Cris-7, BC3, OKT3, including derivatives thereof) and contains one or more insertions, one or more deletions, one or more amino acid substitutions (e.g., conservative amino acid substitutions), or a combination of the above-noted changes, when compared with the V_{L} of the known monoclonal antibody. The insertion(s), deletion(s) or substitution(s) may be anywhere in the V_{L} region, including at the amino- or carboxy-terminus or both ends of this region, provided a binding domain containing the modified V_{L} region can still specifically bind its target with an affinity similar to the wild type binding domain.

[0124] The V_{H} and V_{L} domains may be arranged in either orientation (i.e., from amino-terminus to carboxy terminus, V_{H}-V_{L} or V_{L}-V_{H}) and may be separated by a variable domain linking sequence. In certain embodiments, variable domain linking sequences include those belonging to the family of GlySer, Gly₂Ser (SEQ ID NO:339), Gly₃Ser (SEQ ID NO:340), Gly₄Ser (SEQ ID NO:341), and Gly₅Ser (SEQ ID NO:342), including (Gly₃Ser)₁(Gly₄Ser)₁ (SEQ ID NO:343), (Gly₃Ser)₂(Gly₄Ser)₁ (SEQ ID NO:344), (Gly₃Ser)₃(Gly₄Ser)₁ (SEQ ID NO:345), (Gly₃Ser)₄(Gly₄Ser)₁ (SEQ ID NO:346), (Gly₃Ser)₅(Gly₄Ser)₁ (SEQ ID NO:347), (Gly₃Ser)₁(Gly₄Ser)₁ (SEQ ID NO:348), (Gly₃Ser)₁(Gly₄Ser)₂(SEQ ID NO:349), (Gly₃Ser)₁(Gly₄Ser)₃(SEQ ID NO:350), (Gly₃Ser)₁(Gly₄Ser)₄(SEQ ID NO:351), (Gly₃Ser)₁(Gly₄Ser)₅ (SEQ ID NO:352), (Gly₃Ser)₃(Gly₄Ser)₃ (SEQ ID NO:353), (Gly₃Ser)₄(Gly₄Ser)₄ (SEQ ID NO:354), (Gly₃Ser)₅(Gly₄Ser)₅ (SEQ ID NO:355), or (Gly₄Ser)₂ (SEQ ID NO:356), (Gly₄Ser)₃ (SEQ ID NO:145), (Gly₄Ser)₄ (SEQ ID NO:357), or (Gly₄Ser)₅ (SEQ ID NO:358). In certain embodiments, the variable domain linking sequence is GGGGSGGGGSGGGGSAQ (SEQ ID NO:98). In preferred embodiments, these (GlyₓSer)-based linkers are used to link variable domains and are not used to link a binding domain (e.g., scFv) to an Fc tail (e.g., an IgG CH2CH3). In certain embodiments, a variable domain linking sequence comprises from about 5 to about 35 amino acids and preferably comprises from about 15 to about 25 amino acids.

[0125] Any of the insertion(s), deletion(s) or substitution(s) at the amino- or carboxy-terminus of a particular domain or region, as described herein, may be a result, for example, of how one variable region is engineered to be linked to another variable region (e.g., amino acid changes at the junctions between a V_{H} and a V_{L} region, or between a V_{L} and a V_{H} region) or how a binding domain is engineered to be linked to a constant region (e.g., amino acid changes at the junction between a binding domain and a hinge linker). For example, one or more (e.g., 2-8) amino acids may be added, deleted, or substituted at one or more of the fusion protein junctions, as described in more detail below.

[0126] Exemplary binding domains of the present disclosure include those as set forth in SEQ ID NOS:18, 20, 48, 62, and 258-264. In certain preferred embodiments, a single chain fusion protein of this disclosure comprises a binding domain having an amino acid sequence as set forth in any one of SEQ ID NOS:258-264.

[0127] Linker Polypeptide

[0128] As described herein, fusion proteins of the present disclosure comprise a linker polypeptide that links a binding domain that specifically binds to a TCR complex or component thereof to either an immunoglobulin C_{H2} region or an immunoglobulin C_{H3} region. In addition to providing a spacing function between the binding domain and the rest of a fusion protein, a linker can provide flexibility or rigidity suitable for properly orienting the binding domain of a fusion protein to interact with its target (i.e., a TCR complex or a component thereof, such as CD3). Further, a linker can support expression of a full-length fusion protein and provide stability for a purified protein both in vitro and in vivo following administration to a subject in need thereof, such as a human, and is preferably non-immunogenic or poorly immunogenic in such a subject.

[0129] Linkers contemplated in this disclosure include, for example, peptides derived from an interdomain region of an immunoglobulin superfamily member, an immunoglobulin interdomain region (e.g., an antibody hinge region), or a stalk region of C-type lectins, a family of type II membrane proteins (see, e.g., exemplary lectin stalk region sequences set forth in of PCT Application Publication No. WO 2007/146968, such as SEQ ID NOS:111, 113, 115, 117, 119, 121, 123, 125, 127, 129, 131, 133, 135, 149, 151, 153, 155, 157, 159, 161, 163, 165, 167, 169, 231, 233, 235, 237, 239, 241, 243, 245, 247, 249, 251, 253, 255, 257, 259, 261, 263, 265, 267, 269, 271, 273, 275, 277, 279, 281, 287, 289, 297, 305, 307, 309-311, 313-331, 346, 373-377, 380, or 381 from that publication, which are incorporated herein by reference), and a cluster of differentiation (CD) molecule stalk region.

[0130] A linker suitable for use in the fusion proteins of this disclosure includes an antibody hinge region selected from an IgG hinge, IgA hinge, IgD hinge, IgE C_{H2}, IgM C_{H2}, or fragments or variants thereof. In certain preferred embodiments, a linker may be an antibody hinge region selected from human IgG1, human IgG2, human IgG3, human IgG4, or fragments or variants thereof. In some embodiments, the linker is a wild type immunoglobulin hinge region, such as a wild type human immunoglobulin hinge region. Exemplary linkers are a wild type human IgG1 hinge region and a wild type mouse IGHG2c hinge region, the sequence of which are set forth in SEQ ID NOS:63 and 72, respectively.

[0131] In certain embodiments, one or more amino acid residues may be added at the amino- or carboxy-terminus of a wild type immunoglobulin hinge region as part of a fusion protein construct design. Representative modified linkers can have additional junction amino acid residues at the amino-terminus, such as “RT” (e.g., shown in SEQ ID NOS:100 and 52), “RSS” (e.g., shown in SEQ ID NOS:328 and 331-338), “TG” (e.g., shown in SEQ ID NO:177), or “T” (e.g., shown in SEQ ID NO:300); at the carboxy-terminus, such as “SG” (e.g., shown in SEQ ID NOS:212 and 213); or a deletion combined with an addition, such as ΔP with “SG” added at the carboxy terminus (e.g., shown in SEQ ID NO:212).

[0132] In preferred embodiments, a linker is a mutated immunoglobulin hinge region, such as a mutated IgG immunoglobulin hinge region. For example, a wild type human IgG1 hinge region contains three cysteine residues: The most amino-terminal cysteine is referred to as the first cysteine, whereas the most carboxy-terminal cysteine of the hinge region is referred to as the third cysteine. In certain embodiments, a linker is a mutated human IgG1 hinge region with only two cysteine residues, such as a human IgG1 hinge region with the first cysteine substituted by a serine. In certain other embodiments, a linker is a mutated human IgG1 hinge region with only one cysteine residue, such as the first, second, or third cysteine. In certain embodiments, the first proline carboxy-terminal to the third cysteine in a human IgG1 hinge region is substituted, for example, by a serine. Exemplary mutated human IgG1 hinge regions that may be used as a linker polypeptide between a binding domain and the rest of the fusion protein are listed in the sequence listing, such as linkers 47-49, 51, and 53-60 (SEQ ID NOS:99, 146-148 and 150-157, respectively). In certain embodiments, one or more amino acid residues may be added at the amino- or carboxy-terminus of a mutated immunoglobulin hinge region as part of a fusion protein construct design. Examples of such modified linkers are set forth in SEQ ID NOS:10, 335 and 300, wherein amino acid residues “RT,” “RSS,” or “T”, respectively, are added to the amino-terminus of a mutated human IgG1 hinge region.

[0133] In certain embodiments, a linker may have one or more than one cysteine residue but has a single cysteine residue for formation of an interchain disulfide bond, such as the second or third cysteine of IgG1. In other embodiments, a linker may have more than two cysteine residues but has two cysteine residues for formation of interchain disulfide bonds.

[0134] In certain embodiments, linker polypeptides of the present disclosure are derived from a wild type immunoglobulin hinge region (e.g., an IgG1 hinge region) and contain one or more (e.g., 1, 2, 3, or 4) insertions, one or more (e.g., 1, 2, 3, or 4) deletions, one or more (e.g., 1, 2, 3, or 4) amino acid substitutions (e.g., conservative amino acid substitutions or non-conservative amino acid substitutions), or a combination of the above-noted mutations, when compared with the wild type immunoglobulin hinge region and provided the modified hinge retains the flexibility or rigidity suitable for properly orienting the binding domain of a fusion protein to interact with its target. The insertion(s), deletion(s) or substitution(s) may be anywhere in the wild type immunoglobulin hinge region, including at the amino- or carboxy-terminus or both ends. In certain embodiments, a linker polypeptide comprises or is a sequence that is at least 80%, at least 81%, at least 82%, at least 83%, at least 84%, at least 85%, at least 86%, at least 87%, at least 88%, at least 89%, at least 90%, at least 91%, at least 92%, at least 93%, at least 94%, at least 95%, at least 96%, at least 97%, at least 98%, at least 99% identical to a wild type immunoglobulin hinge region, such as a wild type human IgG1 hinge, a wild type human IgG2 hinge, or a wild type human IgG4 hinge.

[0135] Alternative hinge or linker sequences may be crafted from portions of cell surface receptors that connect IgV-like or IgC-like domains. Regions between IgV-like domains where a cell surface receptor contains multiple IgV-like domains in tandem and between IgC-like domains where a cell surface receptor contains multiple tandem IgC-like regions could also be used as a connecting region or linker peptide. Representative hinge or linker sequences of the interdomain regions between the IgV-like and IgC-like or between the IgC-like or IgV-like domains are found in CD2, CD4, CD22, CD33, CD48, CD58, CD66, CD80, CD86, CD96, CD150, CD166, and CD244. More alternative hinges may be crafted from disulfide-containing regions of Type II receptors from non-immunoglobulin superfamily members, such as CD69, CD72, and CD161.

[0136] In certain embodiments, hinge or linker sequences have 2 to 150 amino acid, 5 to 60 amino acids, 2 to 40 amino acids, preferably have 8-20, more preferably have 12-15 amino acids, and may be primarily flexible, but may also provide more rigid characteristics or may contain primarily α helical structure with minimal β sheet structure. Preferably, hinge and linker sequences are stable in plasma and serum and are resistant to proteolytic cleavage. In certain embodiments, the first lysine in the IgG1 upper hinge region is mutated to minimize proteolytic cleavage, preferably the lysine is substituted with methionine, threonine, alanine or glycine, or is deleted (see, e.g., SEQ ID NOS:379-434, which may include junction amino acids at the amino end, preferably RT). In some embodiments, sequences may contain a naturally occurring or added motif such as a core structure CPPC (SEQ ID NO:330) that confers the capacity to form a disulfide bond or multiple disulfide bonds to stabilize the carboxy-terminus of a molecule. In other embodiments, sequences may contain one or more glycosylation sites. An unexpected feature of altering hinge length is allowing modulation of the level of calcium flux caused by single chain fusion proteins of the present disclosure (see, Example 5). Exemplary hinges for modulating calcium flux include SEQ ID NOS:212-218. In addition, hinge length and/or sequence may also affect the activities of fusion proteins in blocking T cell response to alloantigen (see Example 10). Linkers useful as connecting regions in the fusion proteins of this disclosure are set forth in SEQ ID NOS:379-434.

[0137] Immunoglobulin C_{H2} Region Polypeptide

[0138] As described herein, a fusion protein of the present disclosure may comprise an immunoglobulin C_{H2} region that comprises an amino acid substitution at the asparagine of position 297 (e.g., asparagine to alanine). Such an amino acid substitution reduces or eliminates glycosylation at this site and abrogates efficient Fc binding to FcγR and C1q.

[0139] In certain embodiments, a fusion protein of the present disclosure may comprise an immunoglobulin C_{H2} region that comprises at least one substitution or deletion at positions 234 to 238. For example, an immunoglobulin C_{H2} region can comprise a substitution at position 234, 235, 236, 237 or 238, positions 234 and 235, positions 234 and 236, positions 234 and 237, positions 234 and 238, positions 234-236, positions 234, 235 and 237, positions 234, 236 and 238, positions 234, 235, 237, and 238, positions 236-238, or any other combination of two, three, four, or five amino acids at positions 234-238. In addition or alternatively, a mutated C_{H2} region may comprise one or more (e.g., two, three, four or five) amino acid deletions at positions 234-238, preferably at one of position 236 or position 237 while the other position is substituted. The above-noted mutation(s) decrease or eliminate the antibody-dependent cell-mediated cytotoxicity (ADCC) activity or Fc receptor-binding capability of the fusion protein. In certain preferred embodiments, the amino acid residues at one or more of positions 234-238 has been replaced with one or more alanine residues. In further preferred embodiments, only one of the amino acid residues at positions 234-238 have been deleted while one or more of the remaining amino acids at positions 234-238 can be substituted with another amino acid (e.g., alanine or serine).

[0140] In certain other embodiments, a fusion protein of the present disclosure may comprise an immunoglobulin C_{H2} region that comprises one or more amino acid substitutions at positions 253, 310, 318, 320, 322, and 331. For example, an immunoglobulin C_{H2} region can comprise a substitution at position 253, 310, 318, 320, 322, or 331, positions 318 and 320, positions 318 and 322, positions 318, 320 and 322, or any other combination of two, three, four, five or six amino acids at positions 253, 310, 318, 320, 322, and 331. The above-noted mutation(s) decrease or eliminate the complement-dependent cytotoxicity (CDC) of the fusion protein.

[0141] In certain other embodiments, in addition to the amino acid substitution at position 297, a mutated C_{H2} region in a fusion protein of the present disclosure can further comprise one or more (e.g., two, three, four, or five) additional substitutions at positions 234-238. For example, an immunoglobulin C_{H2} region can comprise a substitution at positions 234 and 297, positions 234, 235, and 297, positions 234, 236 and 297, positions 234-236 and 297, positions 234, 235, 237 and 297, positions 234, 236, 238 and 297, positions 234, 235, 237, 238 and 297, positions 236-238 and 297, or any combination of two, three, four, or five amino acids at positions 234-238 in addition to position 297. In addition or alternatively, a mutated C_{H2} region may comprise one or more (e.g., two, three, four or five) amino acid deletions at positions 234-238, such as at position 236 or position 237. The additional mutation(s) decreases or eliminates the antibody-dependent cell-mediated cytotoxicity (ADCC) activity or Fc receptor-binding capability of the fusion protein. In certain embodiments, the amino acid residues at one or more of positions 234-238 have been replaced with one or more alanine residues. In further embodiments, only one of the amino acid residues at positions 234-238 has been deleted while one or more of the remaining amino acids at positions 234-238 can be substituted with another amino acid (e.g., preferably alanine or serine).

[0142] In certain embodiments, in addition to one or more (e.g., 2, 3, 4, or 5) amino acid substitutions at positions 234-238, the mutated C_{H2} region in a fusion protein of the present disclosure may contain one or more (e.g., 2, 3, 4, 5, or 6) additional amino acid substitutions (e.g., substituted with alanine) at one or more positions involved in complement fixation (e.g., at positions I253, H310, E318, K320, K322, or P331). Preferred mutated immunoglobulin C_{H2} regions include human IgG1, IgG2, IgG4 and mouse IgG2a C_{H2} regions with alanine substitutions at positions 234, 235, 237 (if present), 318, 320 and 322. An exemplary mutated immunoglobulin C_{H2} region is mouse IGHG2c C_{H2} region with alanine substitutions at L234, L235, G237, E318, K320, and K322 (SEQ ID NO:50).

[0143] In still further embodiments, in addition to the amino acid substitution at position 297 and the additional deletion(s) or substitution(s) at positions 234-238, a mutated C_{H2} region in a fusion protein of the present disclosure can further comprise one or more (e.g., two, three, four, five, or six) additional substitutions at positions 253, 310, 318, 320, 322, and 331. For example, an immunoglobulin C_{H2} region can comprise a (1) substitution at position 297, (2) one or more substitutions or deletions or a combination thereof at positions 234-238, and one or more (e.g., 2, 3, 4, 5, or 6) amino acid substitutions at positions 1253, H310, E318, K320, K322, and P331, such as one, two, three substitutions at positions E318, K320 and K322. Preferably, the amino acids at the above-noted positions are substituted by alanine or serine.

[0144] In certain embodiments, the immunoglobulin C_{H2} region polypeptide comprises: (i) an amino acid substitution at the asparagine of position 297 and one amino acid substitution at position 234, 235, 236 or 237; (ii) an amino acid substitution at the asparagine of position 297 and amino acid substitutions at two of positions 234-237; (iii) an amino acid substitution at the asparagine of position 297 and amino acid substitutions at three of positions 234-237; (iv) an amino acid substitution at the asparagine of position 297, amino acid substitutions at positions 234, 235 and 237, and an amino acid deletion at position 236; (v) amino acid substitutions at three of positions 234-237 and amino acid substitutions at positions 318, 320 and 322; or (vi) amino acid substitutions at three of positions 234-237, an amino acid deletion at position 236, and amino acid substitutions at positions 318, 320 and 322.

[0145] Exemplary mutated immunoglobulin C_{H2} regions with amino acid substitutions at the asparagine of position 297 in the fusion proteins of the present disclosure include: human IgG1 C_{H2} region with alanine substitutions at L234, L235, G237 and N297 and a deletion at G236 (SEQ ID NO:103), human IgG2 C_{H2} region with alanine substitutions at V234, G236, and N297 (SEQ ID NO:104), human IgG4 C_{H2} region with alanine substitutions at F234, L235, G237 and N297 and a deletion of G236 (SEQ ID NO:75), human IgG4 C_{H2} region with alanine substitutions at F234 and N297 (SEQ ID NO:375), human IgG4 C_{H2} region with alanine substitutions at L235 and N297 (SEQ ID NO:376), human IgG4 C_{H2} region with alanine substitutions at G236 and N297 (SEQ ID NO:377), and human IgG4 C_{H2} region with alanine substitutions at G237 and N297 (SEQ ID NO:378).

[0146] In certain embodiments, in addition to the amino acid substitutions described above, a mutated C_{H2} region in a fusion protein of the present disclosure may contain one or more additional amino acid substitutions at one or more positions other than the above-noted positions. Such amino acid substitutions may be conservative or non-conservative amino acid substitutions. For example, in certain embodiments, P233 may be changed to E233 in a mutated IgG2 C_{H2} region (see, e.g., SEQ ID NO:104). In addition or alternatively, in certain embodiments, the mutated C_{H2} region in a fusion protein of the present disclosure may contain one or more amino acid insertions, deletions, or both. The insertion(s), deletion(s) or substitution(s) may anywhere in an immunoglobulin C_{H2} region, such as at the N- or C-terminus of a wild type immunoglobulin C_{H2} region resulting from linking the C_{H2} region with another region (e.g., a variable region) via a linker.

[0147] In certain embodiments, the mutated C_{H2} region in a fusion protein of the present disclosure comprises or is a sequence that is at least 90%, at least 91%, at least 92%, at least 93%, at least 94%, at least 95%, at least 96%, at least 97%, at least 98%, at least 99% identical to a wild type immunoglobulin C_{H2} region, such as the C_{H2} region of wild type human IgG1, IgG2, or IgG4, or mouse IgG2a (e.g., IGHG2c).

[0148] A mutated immunoglobulin C_{H2} region in a fusion protein of the present disclosure may be derived from a C_{H2} region of various immunoglobulin isotypes, such as IgG1, IgG2, IgG3, IgG4, IgA1, IgA2, and IgD, from various species (including human, mouse, rat, and other mammals). In certain preferred embodiments, a mutated immunoglobulin C_{H2} region in a fusion protein of the present disclosure may be derived from a C_{H2} region of human IgG1, IgG2 or IgG4, or mouse IgG2a (e.g., IGHG2c), whose sequences are set forth in SEQ ID NOS:64, 66, 68 and 73.

[0149] Methods are known in the art for making mutations inside or outside an Fc domain that can alter Fc interactions with Fc receptors (CD16, CD32, CD64, CD89, FcεR1, FcRn) or with the complement component C1q (see, e.g., U.S. Pat. No. 5,624,821; Presta (2002) Curr. Pharma. Biotechnol. 3:237).

[0150] In certain embodiments, a fusion protein of the present disclosure does not comprise any immunoglobulin C_{H2} region.

[0151] Immunoglobulin C_{H3} Region Polypeptide

[0152] As described herein, a fusion protein of the present disclosure comprises one or more immunoglobulin C_{H3} region polypeptides. In certain embodiments, a fusion protein of the present disclosure does not contain any C_{H2} region. In such embodiments, the binding domain that specifically binds to a TCR complex or a component thereof is directly linked to an immunoglobulin C_{H3} region via a linker (e.g., hinge) polypeptide. In certain embodiments where a C_{H2} region is absent, a fusion protein of the present disclosure may comprise only one C_{H3} region. Alternative embodiments include a fusion protein of the present disclosure that comprises two C_{H3} regions and no C_{H2} region.

[0153] In the embodiments where a fusion protein comprises both a mutated immunoglobulin C_{H2} region and an immunoglobulin C_{H3} region, the C_{H2} and C_{H3} regions may be derived from the same, or different, immunoglobulins, antibody isotypes, or allelic variants. Preferably, the C_{H2} region is directly linked to the amino-terminus of the C_{H3} region. Exemplary sequences that comprise a C_{H2} region directly linked to the amino terminus of a C_{H3} region are set forth in SEQ ID NOS:11-14 and 101. Alternatively, the C_{H2} region may be linked to the C_{H3} region via one or more amino acids or via a linker (see, e.g., linkers as set forth in the sequence listing).

[0154] In certain embodiments, a fusion protein of the present disclosure may comprise two immunoglobulin C_{H3} regions. These C_{H3} regions may be wild type or mutated C_{H3} regions from the same immunoglobulin isotypes, or may be from different immunoglobulin isotypes. For example, in certain embodiments, a fusion protein comprises a C_{H3} region of human IgM and a C_{H3} region of human IgG1. Exemplary sequences in which a C_{H3} region of human IgM and a C_{H3} region of human IgG1 are linked together include SEQ ID NOS:15 and 74. In certain other embodiments, a fusion protein comprises a mouse C_{H3μ} region and a mouse C_{H3γ} region. Exemplary sequences in which a mouse C_{H3μ} region and a mouse C_{H3γ} region are linked together include SEQ ID NOS:308 and 309.

[0155] In the embodiments where the fusion protein comprises two immunoglobulin C_{H3} regions, a C_{H3} region located amino-terminal to the other C_{H3} region is referred to as “the first C_{H3} region.” The other C_{H3} region is referred to as “the second C_{H3} region.” In such embodiments, the two immunoglobulin C_{H3} regions may be fused directly with each other. In other words, the C-terminus of the first C_{H3} region is directly linked to the amino-terminus of the second C_{H3} region without any intervening amino acid residues between them (i.e., in the absence of a linker). Alternatively, the two C_{H3} regions may be linked via one or more (e.g., 2-8) amino acids or via a linker (see, e.g., linkers as set forth in the sequence listing).

[0156] In certain embodiments, an immunoglobulin C_{H3} region in the fusion protein of the present disclosure may contain one or more (e.g., 2-8) additional amino acid substitutions. Such amino acid substitutions may be conservative or non-conservative. In addition or alternatively, in certain embodiments, the C_{H3} region in the fusion protein of the present disclosure may contain one or more (e.g., 2-8) amino acid insertions, deletions, or both at different positions. The insertion(s), deletion(s) or substitution(s) may be anywhere in an immunoglobulin C_{H3} region, including at the amino- or carboxy-terminus or both.

[0157] In certain embodiments, the immunoglobulin C_{H3} region in the fusion protein of the present disclosure comprises or is a sequence that is at least 90%, at least 91%, at least 92%, at least 93%, at least 94%, at least 95%, at least 96%, at least 97%, at least 98%, at least 99% identical to a wild type immunoglobulin C_{H3} region, such as the C_{H3} region of wild type human IgM, IgG1, IgG2, or IgG4.

[0158] In certain embodiments, an immunoglobulin C_{H3} region polypeptide is a wild type immunoglobulin C_{H3} region polypeptide, including a wild type C_{H3} region of any one of the various immunoglobulin isotypes (e.g., IgA, IgD, IgG1, IgG2, IgG3, IgG4, IgE, or IgM) from various species (i.e., human, mouse, rat or other mammals). For example, the immunoglobulin C_{H3} region may be a wild type human IgG1 C_{H3} region (e.g., SEQ ID NO:65), a wild type human IgG2 C_{H3} region (e.g., SEQ ID NO:67), a wild type human IgG4 C_{H3} region (e.g., SEQ ID NO: 69), a wild type human IgM C_{H3} region (e.g., SEQ ID NO:71), a mouse C_{H3μ} region (e.g., SEQ ID NO:329) or a wild type mouse IGHG2c C_{H3} region (e.g., SEQ ID NO:54). In further embodiments, an immunoglobulin C_{H3} region polypeptide is a mutated immunoglobulin C_{H3} region polypeptide. The mutations in the immunoglobulin C_{H3} region may be at one or more positions that are involved in complement fixation, such as at H433 or N434.

[0159] Additional Sequences and Modifications

[0160] As described herein, a single chain fusion protein of the present disclosure can comprise from amino-terminus to carboxy-terminus: (a) a binding domain that specifically binds to CD3 (such as CD3ε), (b) a linker polypeptide, (c) optionally an immunoglobulin C_{H2} region polypeptide, and (d) an immunoglobulin C_{H3} region polypeptide. In addition, a fusion protein of the present disclosure may comprise one or more additional regions, such as a leader sequence at its amino-terminus for expression of a fusion protein, an additional Fc sub-region (e.g., a wild type or mutated C_{H4} region of IgM or IgE), or a tail sequence at its carboxy-terminus for identification or purification purposes. Exemplary tail sequence may include epitope tags for detection or purification, such as a 6-Histidine region or a FLAG epitope.

[0161] For example, the fusion protein may have additional amino acid residues that arise from use of specific expression systems. For example, use of commercially available vectors that express a desired polypeptide as part of a glutathione-S-transferase (GST) fusion product provides the desired polypeptide having an additional glycine residue at position −1 after cleavage of the GST component from the desired polypeptide. Variants which result from expression in other vector systems are also contemplated, including those wherein histidine tags are incorporated into the amino acid sequence, generally at the carboxy and/or amino terminus of the sequence. An exemplary additional sequence that may be present at the carboxy- or amino-terminus of a fusion protein comprises three copies of the FLAG epitope, one copy of the AVI tag, and six histidines as set forth in SEQ ID NO:70.

[0162] In certain embodiments, the fusion protein of the present disclosure comprises a leader peptide at its N-terminus. The lead peptide facilitates secretion of expressed fusion proteins. Using any of the conventional leader peptides (signal sequences) is expected to direct nascently expressed polypeptides or fusion proteins into a secretory pathway and to result in cleavage of the leader peptide from the mature fusion protein at or near the junction between the leader peptide and the fusion protein. A particular leader peptide will be chosen based on considerations known in the art, such as using sequences encoded by nucleic acid molecules that allow the easy inclusion of restriction endonuclease cleavage sites at the beginning or end of the coding sequence for the leader peptide to facilitate molecular engineering, provided that such introduced sequences specify amino acids that either do not interfere unacceptably with any desired processing of the leader peptide from the nascently expressed protein or do not unacceptably interfere with any desired function of a polypeptide or fusion protein if the leader peptide is not cleaved during maturation of the polypeptides or fusion proteins. Exemplary leader peptides of this disclosure include natural leader sequences or others, such as H₃N-MDFQVQIFSFLLISASVIMSRG-CO₂H (SEQ ID NO:9).

[0163] In certain embodiments, a fusion protein of the present disclosure is glycosylated, wherein the pattern of glycosylation is dependent upon a variety of factors including the host cell in which the protein is expressed (if prepared in recombinant host cells) and the culture conditions.

[0164] In further embodiments, the immunoglobulin C_{H2} or C_{H3} regions of a fusion protein of the present disclosure may have an altered glycosylation pattern relative to the C_{H2} or C_{H3} regions of an immunoglobulin reference sequence. For example, any of a variety of genetic techniques may be employed to alter one or more particular amino acid residues that form a glycosylation site (see Co et al. (1993) Mol. Immunol. 30:1361; Jacquemon et al. (2006) J. Thromb. Haemost. 4:1047; Schuster et al. (2005) Cancer Res. 65:7934; Warnock et al. (2005) Biotechnol. Bioeng. 92:831). Alternatively, the host cells in which fusion proteins of this disclosure are produced may be engineered to produce an altered glycosylation pattern.

[0165] In certain embodiments, the present disclosure also provides derivatives of the fusion proteins described herein. Derivatives include fusion proteins bearing modifications other than insertions, deletions, or substitutions of amino acid residues. Preferably, the modifications are covalent in nature, and include for example, chemical bonding with polymers, lipids, other organic and inorganic moieties. Derivatives of this disclosure may be prepared to increase circulating half-life of a specific fusion protein, or may be designed to improve targeting capacity for the fusion protein to desired cells, tissues, or organs.

[0166] In certain embodiments, the in vivo half-life of the fusion protein of this disclosure can be increased using methods known in the art for increasing the half-life of large molecules. For example, this disclosure embraces fusion proteins that are covalently modified or derivatized to include one or more water-soluble polymer attachments, such as polyethylene glycol, polyoxyethylene glycol, or polypropylene glycol (see, e.g., U.S. Pat. Nos. 4,640,835; 4,496,689; 4,301,144; 4,670,417; 4,791,192; 4,179,337). Still other useful polymers known in the art include monomethoxy-polyethylene glycol, dextran, cellulose, and other carbohydrate-based polymers, poly-(N-vinyl pyrrolidone)-polyethylene glycol, propylene glycol homopolymers, a polypropylene oxide/ethylene oxide co-polymer, polyoxyethylated polyols (e.g., glycerol) and polyvinyl alcohol, as well as mixtures of these polymers. Particularly preferred are polyethylene glycol (PEG)-derivatized proteins. Water-soluble polymers may be bonded at specific positions, for example at the amino terminus of the fusion proteins according to this disclosure, or randomly attached to one or more side chains of the polypeptide. The use of PEG for improving therapeutic capacities is described in U.S. Pat. No. 6,133,426.

[0167] In some embodiments, a fusion protein according to the present disclosure is a PIMS molecule that further contains an amino-terminally disposed immunoglobulin hinge region. The amino-terminal hinge region may be the same as, or different than, the linker found between an immunoglobulin C_{H3} region and a binding domain. In some embodiments, an amino-terminally disposed linker contains a naturally occurring or added motif (such as CPPC, SEQ ID NO:330) to promote the formation of at least one disulfide bond to stabilize the amino-terminus of a dimerized or multimerized molecule.

[0168] Methods for Making and Purifying Fusion Proteins

[0169] The fusion proteins of the present disclosure may be made according to methods known in the art. For example, methods for making SMIP fusion proteins are described in U.S. Patent Publication Nos. 2003/0133939, 2003/0118592 and 2005/0136049, and methods for making PIMS proteins are described, for example, PCT Application Publication No. WO 2009/023386.

[0170] In certain embodiments, the present disclosure provides purified fusion proteins as described herein. The term “purified,” as used herein, refers to a composition, isolatable from other components, wherein the fusion protein is purified to any degree relative to its naturally obtainable state. A “purified protein” therefore also refers to such protein, isolated from the environment in which it naturally occurs. In certain embodiments, the present disclosure provides substantially purified fusion proteins as described herein. “Substantially purified” refers to a protein composition in which the protein forms the major component of the composition, such as constituting at least about 50%, such as at least about 60%, about 70%, about 80%, about 90%, about 95%, about 99%, of the protein, by weight, in the composition.

[0171] Protein purification techniques are well known to those of skill in the art. These techniques involve, at one level, the crude fractionation of the polypeptide and non-polypeptide fractions. Further purification using chromatographic and electrophoretic techniques to achieve partial or complete purification (or purification to homogeneity) is frequently desired. Analytical methods particularly suited to the preparation of a pure fusion protein are ion-exchange chromatography, exclusion chromatography; polyacrylamide gel electrophoresis; and isoelectric focusing. Particularly efficient methods of purifying peptides are fast protein liquid chromatography and HPLC.

[0172] Various methods for quantifying the degree of purification are known to those of skill in the art in light of the present disclosure. These include, for example, determining the specific binding activity of an active fraction, or assessing the amount of protein in a fraction by SDS/PAGE analysis. A preferred method for assessing the purity of a protein fraction is to calculate the binding activity of the fraction, to compare it to the binding activity of the initial extract, and to thus calculate the degree of purification, herein assessed by a “-fold purification number.” The actual units used to represent the amount of binding activity will, of course, be dependent upon the particular assay technique chosen to follow the purification and whether or not the expressed protein exhibits a detectable binding activity.

[0173] Exemplary Fusion Proteins

[0174] Exemplary single chain fusion proteins of the present disclosure include BC3 IgG1 N297, BC3 IgG1AA, BC3 IgG2AA, BC3 IgG4AA, BC3 HM1, BC3 ΔC_{H2}, OKT3 IgG1AA, OKT3 IgG2AA, OKT3 IgG4AA, OKT3 HM1, OKT3 ΔC_{H2}, H57 null2, and 2C11 null2 as set forth in SEQ ID NOS:80-85, 88-93, 96 and 97, respectively. Exemplary preferred single chain fusion proteins of the present disclosure include chimeric Cris-7 IgG1AA, chimeric Cris-7 IgG2AA, chimeric Cris-7 IgG4AA, chimeric Cris-7 HM1, humanized Cris-7 IgG1AA, humanized Cris-7 IgG2AA, humanized Cris-7 IgG4AA, and humanized Cris-7 HM1, as set forth in SEQ ID NOS:265-299, respectively. Additional exemplary single chain fusion proteins include BC3 HM1, BC3 ΔC_{H2}, OKT3 HM1, and OKT3 ΔC_{H2} without their carboxy-terminal tags as set forth in SEQ ID NOS:86, 87, 94, and 95, respectively. Further exemplary fusion proteins include the above-noted fusion protein with their leader sequences at the amino-terminus as set forth in SEQ ID NOS:22, 24, 26, 28, 30, 32, 34, 36, 38, 40, 42, 47, 56, 76-79, 224, 226, 228, 230, 232, 234, 236, 238, 240, 247, 249, 251, 253, 255, and 257. Additional exemplary fusion proteins with their leader sequences at the amino-terminus include H57 half null (SEQ ID NO:304) and H57 HM2 (SEQ ID NO:306). Further exemplary fusion proteins are BC3 IgG1 N297 with various linker sequences as set forth in SEQ ID NOS:311, 313, 315, 317, 319, 321, 323, 325 and 327. Several of these exemplary single chain fusion proteins are described in detail in the Examples section below.

[0175] Functional Features

[0176] As described herein, a single chain fusion protein of the present disclosure may have one or more (e.g., 2, 3, 4, 5, 6, 7), or any combination thereof, of the following characteristics or functional features: (1) not activating T cells, (2) not inducing or inducing minimal cytokine release, (3) inducing phosphorylation of molecules in the TCR signaling pathway, (4) increasing calcium flux more than the corresponding monoclonal antibody, (5) blocking T cell response to an alloantigen, (6) blocking memory T cell response to an antigen, and (7) downmodulating the TCR complex.

[0177] In certain preferred embodiments, a single chain fusion protein of the present disclosure does not or minimally activates T cells. A fusion protein “does not or minimally or nominally activates T cells” if, when used to treat T cells (e.g., PHA- or ConA-primed T cells), the fusion protein does not cause a statistically significant increase in the percentage of activated T cells as compared to untreated cells in at least one in vitro or in vivo assay provided in the examples of the present disclosure. Preferably, T cell activation is measured in the in vitro primed T cell activation assay described in Example 1.

[0178] In further preferred embodiments, a fusion protein of the present disclosure does not induce a cytokine storm or does not induce a clinically relevant cytokine release. A fusion protein “does not induce a cytokine storm” (also referred to as “inducing an undetectable, nominal, or minimal cytokine release” or “does not induce or induces a minimally detectable cytokine release”) if, when used to treat T cells, it does not cause a statistically significant increase in the amount of at least one cytokine including IFNγ; preferably at least two cytokines including IFNγ and TNFα or IL-6 and TNFα; preferably three cytokines including IL-6, IFNγ, and TNFα; preferably four cytokines including IL-2, IL-6, IFNγ, and TNFα; and preferably at least five cytokines including IL-2, IL-6, IL-10, IFNγ, and TNFα; released from treated cells as compared to no treatment in at least one in vitro or in vivo assay known in the art or provided in the examples of the present disclosure. Preferably the cytokine storm is measured in the in vitro cytokine release by primed T cells assay described in Example 1. Clinically, cytokine-release syndrome is characterized by fever, chills, rash, nausea, and sometimes dyspnea and tachycardia, which is in parallel with maximal release of certain cytokines, such as IFNγ, as well as IL-2, IL-6, and TNFα. Cytokines that may be tested for release in an in vitro assay or in vivo include G-CSF, GM-CSF, IL-2, IL-4, IL-5, IL-6, IL-10, IL-13, IL-17, IP-10, KC, MCP1, IFNγ, and TNFα; and more preferably include IL-2, IL-6, IL-10, IFNγ, and TNFα.

[0179] In further preferred embodiments, a fusion protein of the present disclosure causes an increase in calcium flux in cells, such as T cells. A fusion protein causes an “increase in calcium” if, when used to treat T cells, it causes a statistically significant, rapid increase in calcium flux of the treated cells (preferably within 300 seconds, more preferably within 200 seconds, and most preferably within 100 seconds of treatment) as compared to cells treated with the corresponding antibody (i.e., an antibody with the same binding domain as a single chain fusion protein of this disclosure) in an in vitro assay known in the art or provided herein. Preferably the calcium flux caused by a single chain fusion protein of this disclosure is compared to the flux caused by a corresponding antibody in the in vitro calcium flux assay described in Example 5 and is observed or measured within at least the first 100 to 300 seconds of treatment.

[0180] In further embodiments, a single chain fusion protein of the present disclosure induces phosphorylation of a molecule in the TCR signal transduction pathway. The “TCR signal transduction pathway” refers to the signal transduction pathway initiated via the binding of a peptide:MHC ligand to the TCR and its co-receptor (CD4 or CD8). A “molecule in the TCR signal transduction pathway” refers to a molecule that is directly involved in the TCR signal transduction pathway, such as a molecule whose phosphorylation state (e.g., whether the molecule is phosphorylated or not), whose binding affinity to another molecule, or whose enzymatic activity, has been changed in response to the signal from the binding of a peptide:MHC ligand to the TCR and its co-receptor. Exemplary molecules in the TCR signal transduction pathway include the TCR complex or its components (e.g., CD3ζ chains), ZAP-70, Fyn, Lck, phospholipase c-γ, protein kinase C, transcription factor NFκB, phasphatase calcineurin, transcription factor NFAT, guanine nucleotide exchange factor (GEF), Ras, MAP kinase kinase kinase (MAPKKK), MAP kinase kinase (MAPKK), MAP kinase (ERK1/2), and Fos.

[0181] A single chain fusion protein of this disclosure “induces phosphorylation of a molecule in the TCR signal transduction pathway” if, when used to treat T cells, it causes a statistically significant increase in phosphorylation of a molecule in the TCR signal transduction pathway (e.g., CD3ζ chains, ZAP-70, and ERK1/2) in an in vitro or in vivo assay as described in the examples of the present disclosure or receptor signaling assays known in the art. Results from most receptor signaling assays known in the art are determined using immunohistochemical methods, such as western blots or fluorescence microscopy.

[0182] In further embodiments, a single chain fusion protein of the present disclosure can block a T cell response to an alloantigen. An “alloantigen” is an antigen existing in alternative (allelic) forms in a species, thus inducing an immune response when a form is transferred to another member of the species who lacks the alloantigen. Exemplary alloantigens can be found, for example, on blood cells (i.e., blood group antigens) or on tissue grafts (i.e., allografts).

[0183] A single chain fusion protein of this disclosure “blocks T cell response to an alloantigen” if, when used to treat T cells, it causes a statistically significant decrease in the percentage of T cells activated in response to an alloantigen in an in vitro or in vivo assay, such as the human mixed lymphocyte reaction (MLR) assay and the acute graft versus host disease (aGVHD) model provided in the examples of the present disclosure. Other assays known in the art such as binding assays and skin tests, like footpad swelling assays in mice, which detect delayed type hypersensitivity responses, may also be used to determine reactivity to alloantigen.

[0184] In further embodiments, a fusion protein of the present disclosure blocks memory T cell response to an antigen. A single chain fusion protein “blocks memory T cell response to an antigen” if, when used to treat memory T cells, it causes a statistically significant decrease in the percentage of T cells activated in response to a specific antigen (e.g., tetanus toxoid) in an in vitro or in vivo assay, such as the assay analyzing memory T cell activation using tetanus toxoid provided in the examples of the present disclosure. Animal immunization models may also be used to detect a secondary antigen-specific T cell response both in vivo and ex vivo through antigen presentation assays. In addition to the delayed type hypersensitivity assays described above, cytotoxicity assays such as ⁵¹Cr-release assays may be utilized to detect T cell activity (Lavie et al., (2000) International Immunology 12(4):479-486).

[0185] In further embodiments, a fusion protein of the present disclosure downmodulates a TCR complex from the surface of a T cell. A single chain fusion protein “downmodulates TCR complex” if, when used to treat T cells, it causes a statistically significant reduction in the number of TCR complexes on the surface of a T cell population in an in vitro or in vivo assay. Useful in vitro or in vivo assays include the assay for evaluating TCR and CD3 downmodulation from the T cell surface provided in the examples of the present disclosure. Such assays compare the amount of cell surface expressed TCR or CD3 prior to and following stimulation as measured by techniques known in the art, such as flow cytometry and immunofluorescence microscopy.

### Methods for Detecting T Cell Activation or Cytokine Release

[0186] In a related aspect, the present disclosure provides a method for detecting T cell activation induced by a protein that comprises a binding domain that specifically bindings to a TCR complex or a component thereof, comprising: (a) providing mitogen-primed T cells, (b) treating the primed T cells of step (a) with the protein that comprises a binding domain that specifically binds to a TCR complex or a component thereof, and (c) detecting activation of the primed T cells that have been treated in step (b).

[0187] The term “mitogen” as used herein refers to a chemical substance that induces mitosis in lymphocytes of different specificities or clonal origins. Exemplary mitogens that may be used to prime T cells include phytohaemagglutinin (PHA), concanavalin A (ConA), lipopolysaccharide (LPS), pokeweed mitogen (PWM), and phorbol myristate acetate (PMA).

[0188] In certain embodiments of methods for detecting T cell activation provided herein, the protein that comprises a binding domain that specifically binds to a TCR complex or a component thereof is a fusion protein provided herein. In certain other embodiments, the protein that comprises a binding domain that specifically binds to a TCR complex or a component thereof is a monoclonal antibody.

[0189] T cell activation may be detected by measuring the expression of activation markers known in the art, such as CD25, CD40 ligand, and CD69. Activated T cells may also be detected by cell proliferation assays, such as CFSE labeling and thymidine uptake assays (Adams (1969) Exp. Cell Res. 56:55).

[0190] In a related aspect, the present disclosure provides a method for detecting cytokine release induced by a protein that comprises a binding domain that specifically binds to a TCR complex or a component thereof, comprising: (a) providing mitogen-primed T cells, (b) treating the primed T cells of step (a) with the protein that comprises a binding domain that specifically binds to a TCR complex or a component thereof, and (c) detecting release of a cytokine from the primed T cells that have been treated in step (b).

[0191] In certain embodiments of methods for detecting cytokine release provided herein, the protein that comprises a binding domain that specifically binds to a TCR complex or a component thereof is a fusion protein provided herein. In certain other embodiments, the protein that comprises a binding domain that specifically binds to a TCR complex or a component thereof is a monoclonal antibody.

### Polynucleotides, Expression Vectors, and Host Cells

[0192] This disclosure provides polynucleotides (isolated or purified or pure polynucleotides) encoding the fusion proteins of this disclosure, vectors (including cloning vectors and expression vectors) comprising such polynucleotides, and cells (e.g., host cells) transformed or transfected with a polynucleotide or vector according to this disclosure.

[0193] In certain embodiments, a polynucleotide (DNA or RNA) encoding a fusion protein of the present disclosure is contemplated. Exemplary polynucleotides include SEQ ID NOS:21, 23, 25, 27, 29, 31, 33, 35, 37, 39, 41, 43, 46, 55, 303, 306, 310, 312, 314, 316, 318, 320, 322, 324 and 326.

[0194] The present invention also relates to vectors that include a polynucleotide of this disclosure and, in particular, to recombinant expression constructs. In one embodiment, this disclosure contemplates a vector comprising a polynucleotide encoding a fusion protein of this disclosure, along with other polynucleotide sequences that can cause or facilitate transcription, translation, and processing of the fusion protein.

[0195] Appropriate cloning and expression vectors for use with prokaryotic and eukaryotic hosts are described, for example, in Sambrook et al., Molecular Cloning: A Laboratory Manual, Second Edition, Cold Spring Harbor, N.Y., (1989). Exemplary cloning/expression vectors include cloning vectors, shuttle vectors, and expression constructs, that may be based on plasmids, phagemids, phasmids, cosmids, viruses, artificial chromosomes, or any nucleic acid vehicle known in the art suitable for amplification, transfer, and/or expression of a polynucleotide contained therein

[0196] As used herein, “vector” means a nucleic acid molecule capable of transporting another nucleic acid to which it has been linked. Exemplary vectors include plasmids, yeast artificial chromosomes, and viral genomes. Certain vectors can autonomously replicate in a host cell, while other vectors can be integrated into the genome of a host cell and thereby are replicated with the host genome. In addition, certain vectors are referred to herein as “recombinant expression vectors” (or simply, “expression vectors”), which contain nucleic acid sequences that are operatively linked to an expression control sequence and, therefore, are capable of directing the expression of those sequences.

[0197] In certain embodiments, expression constructs are derived from plasmid vectors. Illustrative constructs include modified pNASS vector (Clontech, Palo Alto, Calif.), which has nucleic acid sequences encoding an ampicillin resistance gene, a polyadenylation signal and a T7 promoter site; pDEF38 and pNEF38 (CMC ICOS Biologics, Inc.), which have a CHEF1 promoter; and pEE12.4 (Lonza), which has a CMV promoter. Other suitable mammalian expression vectors are well known (see, e.g., Ausubel et al., 1995; Sambrook et al., supra; see also, e.g., catalogs from Invitrogen, San Diego, Calif.; Novagen, Madison, Wis.; Pharmacia, Piscataway, N.J.). Useful constructs may be prepared that include a dihydrofolate reductase (DHFR)-encoding sequence under suitable regulatory control, for promoting enhanced production levels of the fusion proteins, which levels result from gene amplification following application of an appropriate selection agent (e.g., methotrexate).

[0198] Generally, recombinant expression vectors will include origins of replication and selectable markers permitting transformation of the host cell, and a promoter derived from a highly-expressed gene to direct transcription of a downstream structural sequence, as described above. A vector in operable linkage with a polynucleotide according to this disclosure yields a cloning or expression construct. Exemplary cloning/expression constructs contain at least one expression control element, e.g., a promoter, operably linked to a polynucleotide of this disclosure. Additional expression control elements, such as enhancers, factor-specific binding sites, terminators, and ribosome binding sites are also contemplated in the vectors and cloning/expression constructs according to this disclosure. The heterologous structural sequence of the polynucleotide according to this disclosure is assembled in appropriate phase with translation initiation and termination sequences. Thus, for example, the fusion protein-encoding nucleic acids as provided herein may be included in any one of a variety of expression vector constructs as a recombinant expression construct for expressing such a protein in a host cell.

[0199] The appropriate DNA sequence(s) may be inserted into a vector, for example, by a variety of procedures. In general, a DNA sequence is inserted into an appropriate restriction endonuclease cleavage site(s) by procedures known in the art. Standard techniques for cloning, DNA isolation, amplification and purification, for enzymatic reactions involving DNA ligase, DNA polymerase, restriction endonucleases and the like, and various separation techniques are contemplated. A number of standard techniques are described, for example, in Ausubel et al. (1993 Current Protocols in Molecular Biology, Greene Publ. Assoc. Inc. & John Wiley & Sons, Inc., Boston, Mass.); Sambrook et al. (1989 Molecular Cloning, Second Ed., Cold Spring Harbor Laboratory, Plainview, N.Y.); Maniatis et al. (1982 Molecular Cloning, Cold Spring Harbor Laboratory, Plainview, N.Y.); Glover (Ed.) (1985 DNA Cloning Vol. I and II, IRL Press, Oxford, UK); Hames and Higgins (Eds.), (1985 Nucleic Acid Hybridization, IRL Press, Oxford, UK); and elsewhere.

[0200] The DNA sequence in the expression vector is operatively linked to at least one appropriate expression control sequence (e.g., a constitutive promoter or a regulated promoter) to direct mRNA synthesis. Representative examples of such expression control sequences include promoters of eukaryotic cells or their viruses, as described above. Promoter regions can be selected from any desired gene using CAT (chloramphenicol transferase) vectors or other vectors with selectable markers. Eukaryotic promoters include CMV immediate early, HSV thymidine kinase, early and late SV40, LTRs from retrovirus, and mouse metallothionein-I. Selection of the appropriate vector and promoter is well within the level of ordinary skill in the art, and preparation of certain particularly preferred recombinant expression constructs comprising at least one promoter or regulated promoter operably linked to a nucleic acid encoding a protein or polypeptide according to this disclosure is described herein.

[0201] Variants of the polynucleotides of this disclosure are also contemplated. Variant polynucleotides are at least 90%, and preferably 95%, 99%, or 99.9% identical to one of the polynucleotides of defined sequence as described herein, or that hybridizes to one of those polynucleotides of defined sequence under stringent hybridization conditions of 0.015 M sodium chloride, 0.0015 M sodium citrate at about 65-68° C. or 0.015 M sodium chloride, 0.0015 M sodium citrate, and 50% formamide at about 42° C. The polynucleotide variants retain the capacity to encode a binding domain or fusion protein thereof having the functionality described herein.

[0202] The term “stringent” is used to refer to conditions that are commonly understood in the art as stringent. Hybridization stringency is principally determined by temperature, ionic strength, and the concentration of denaturing agents such as formamide. Examples of stringent conditions for hybridization and washing are 0.015M sodium chloride, 0.0015M sodium citrate at about 65-68° C. or 0.015M sodium chloride, 0.0015M sodium citrate, and 50% formamide at about 42° C. (see Sambrook et al., Molecular Cloning: A Laboratory Manual, 2nd Ed., Cold Spring Harbor Laboratory, Cold Spring Harbor, N.Y. 1989).

[0203] More stringent conditions (such as higher temperature, lower ionic strength, higher concentration of formamide or another denaturing agent) may also be used; however, the rate of hybridization will be affected.

[0204] In certain embodiments, less stringent conditions (such as lower temperature, higher ionic strength, lower concentration of formamide or another denaturing agent) may be used. Exemplary less stringent conditions for hydridization and washing are 0.015M sodium chloride, 0.0015M sodium citrate at about 42° C.). The polynucleotide variants retain the capacity to encode a binding domain or fusion protein thereof having the functionality described herein.

[0205] A further aspect of this disclosure provides a host cell transformed or transfected with, or otherwise containing, any of the polynucleotides or vector/expression constructs of this disclosure. The polynucleotides or cloning/expression constructs of this disclosure are introduced into suitable cells using any method known in the art, including transformation, transfection and transduction. Host cells include the cells of a subject undergoing ex vivo cell therapy including, for example, ex vivo gene therapy. Eukaryotic host cells contemplated as an aspect of this disclosure when harboring a polynucleotide, vector, or protein according to this disclosure include, in addition to a subject's own cells (e.g., a human patient's own cells), VERO cells, HeLa cells, Chinese hamster ovary (CHO) cell lines (including modified CHO cells capable of modifying the glycosylation pattern of expressed multivalent binding molecules, see US Patent Application Publication No. 2003/0115614), COS cells (such as COS-7), W138, BHK, HepG2, 3T3, RIN, MDCK, A549, PC12, K562, HEK293 cells, HepG2 cells, N cells, 3T3 cells, Spodoptera frugiperda cells (e.g., Sf9 cells), Saccharomyces cerevisiae cells, and any other eukaryotic cell known in the art to be useful in expressing, and optionally isolating, a protein or peptide according to this disclosure. Also contemplated are prokaryotic cells, including Escherichia coli, Bacillus subtilis, Salmonella typhimurium, a Streptomycete, or any prokaryotic cell known in the art to be suitable for expressing, and optionally isolating, a protein or peptide according to this disclosure. In isolating protein or peptide from prokaryotic cells, in particular, it is contemplated that techniques known in the art for extracting protein from inclusion bodies may be used. The selection of an appropriate host is within the scope of those skilled in the art from the teachings herein. Host cells that glycosylate the fusion proteins of this disclosure are contemplated.

[0206] The term “recombinant host cell” (or simply “host cell”) refers to a cell containing a recombinant expression vector. It should be understood that such terms are intended to refer not only to the particular subject cell but to the progeny of such a cell. Because certain modifications may occur in succeeding generations due to either mutation or environmental influences, such progeny may not, in fact, be identical to the parent cell, but are still included within the scope of the term “host cell” as used herein.

[0207] Recombinant host cells can be cultured in a conventional nutrient medium modified as appropriate for activating promoters, selecting transformants, or amplifying particular genes. The culture conditions for particular host cells selected for expression, such as temperature, pH and the like, will be readily apparent to the ordinarily skilled artisan. Various mammalian cell culture systems can also be employed to express recombinant protein. Examples of mammalian expression systems include the COS-7 lines of monkey kidney fibroblasts, described by Gluzman (1981) Cell 23:175, and other cell lines capable of expressing a compatible vector, for example, the C127, 3T3, CHO, HeLa and BHK cell lines. Mammalian expression vectors will comprise an origin of replication, a suitable promoter and, optionally, enhancer, and also any necessary ribosome binding sites, polyadenylation site, splice donor and acceptor sites, transcriptional termination sequences, and 5′-flanking nontranscribed sequences, for example, as described herein regarding the preparation of multivalent binding protein expression constructs. DNA sequences derived from the SV40 splice, and polyadenylation sites may be used to provide the required nontranscribed genetic elements. Introduction of the construct into the host cell can be effected by a variety of methods with which those skilled in the art will be familiar, including calcium phosphate transfection, DEAE-Dextran-mediated transfection, or electroporation (Davis et al. (1986) Basic Methods in Molecular Biology).

[0208] In one embodiment, a host cell is transduced by a recombinant viral construct directing the expression of a protein or polypeptide according to this disclosure. The transduced host cell produces viral particles containing expressed protein or polypeptide derived from portions of a host cell membrane incorporated by the viral particles during viral budding.

[0209] Compositions and Methods of Use

[0210] In addition to fusion proteins directed against a TCR complex or a component thereof, the present disclosure also provides pharmaceutical compositions and unit dose forms that comprise the fusion proteins, as well as methods for using the fusion proteins, the pharmaceutical compositions and unit dose forms.

[0211] To treat human or non-human mammals suffering a disease state or a condition associated with TCR signaling, a fusion protein is administered to the subject in an amount that is effective to ameliorate symptoms of the disease state or condition following a course of one or more administrations. Being polypeptides, the proteins of this disclosure can be suspended or dissolved in a pharmaceutically acceptable diluent, optionally including a stabilizer or other pharmaceutically acceptable excipient, which can be used for intravenous administration by injection or infusion, as more fully discussed below.

[0212] A pharmaceutically effective amount or dose is the amount or dose required to prevent, inhibit the occurrence of, or treat (alleviate a symptom to some extent, preferably all symptoms of) a disease state or condition. In a preferred embodiment, a pharmaceutically effective amount of the single chain fusion proteins of the instant disclosure are used to treat T cell mediated diseases. The pharmaceutically effective dose depends on the type of disease, the composition used, the route of administration, the type of subject being treated, the physical characteristics of the specific subject under consideration for treatment, concurrent medication, and other factors that those skilled in the medical arts will recognize. For example, an amount between 0.1 mg/kg and 100 mg/kg body weight (which can be administered as a single dose, daily, weekly, monthly, or at any appropriate interval) of active ingredient may be administered depending on the potency of a fusion protein of this disclosure.

[0213] As described above and illustrated in the examples, fusion proteins directed against a TCR complex or a component thereof, such as CD3, provided herein uniquely engage the TCR signaling pathway without the induction of T cell mitogenicity. Previous studies have demonstrated that peripheral T cell function and differentiation can be driven by manipulation of TCR-associated signaling cascades. For example, both T cell anergy and adaptive regulatory T cells can be induced by strong, non-activating signals. In addition, certain subsets of T cells may be more prone to cell death upon delivery of a strong TCR signal. Thus, the fusion proteins provided herein could be used for the modulation of T cell function and fate, thereby providing therapeutic treatment of T cell mediated disease, including autoimmune or inflammatory diseases in which T cells are significant contributors. Moreover, because the fusion proteins of the present disclosure do not activate T cells and/or do not induce cytokine release, they are advantageous over other molecules directed against the TCR complex (e.g., anti-CD3 antibodies) for having no or reduced side effects such as cytokine release syndrome and acute toxicity.

[0214] Exemplary autoimmune or inflammatory disorders (AIID) that may be treated by the fusion proteins and compositions and unit dose forms thereof include, and are not limited to, inflammatory bowel disease (e.g., Crohn's disease or ulcerative colitis), diabetes mellitus (e.g., type I diabetes), dermatomyositis, polymyositis, pernicious anaemia, primary biliary cirrhosis, acute disseminated encephalomyelitis (ADEM), Addison's disease, ankylosing spondylitis, antiphospholipid antibody syndrome (APS), autoimmune hepatitis, Goodpasture's syndrome, Graves' disease, Guillain-Barré syndrome (GBS), Hashimoto's disease, idiopathic thrombocytopenic purpura, systemic lupus erythematosus, lupus nephritis, neuropsychiatric lupus, multiple sclerosis (MS), myasthenia gravis, pemphigus vulgaris, asthma, psoriatic arthritis, rheumatoid arthritis, Sjögren's syndrome, temporal arteritis (also known as “giant cell arteritis”), autoimmune hemolytic anemia, Bullous pemphigoid, vasculitis, coeliac disease, chronic obstructive pulmonary disease, endometriosis, Hidradenitis suppurativa, interstitial cystitis, morphea, scleroderma, narcolepsy, neuromyotonia, vitiligo, and autoimmune inner ear disease.

[0215] In certain embodiments, fusion proteins and compositions and unit dose forms provided herein may be used as immunosuppressants with no side effects, or minimal or reduced side effects, associated with cytokine release. For example, single chain fusion proteins and compositions and unit dose forms provided herein may be used in both induction and prevention (i.e., reduce the risk of) or reduction in acute rejection, delayed graft function, and graft loss of solid organ transplants (e.g., kidney, liver, lung, heart transplants). In addition, without inducing T cell activation, in certain embodiments, single chain fusion proteins of this disclosure may be more effective as an immunosuppressant than other molecules directed against the TCR complex known to be both immunosuppressive and T cell mitogenic. In further embodiments, fusion proteins and compositions and unit dose forms provided herein may be used to treat other T cell mediated diseases, such as graft versus host disease (GVHD) and autoimmune and inflammatory disorders (AIID).

[0216] In another aspect, compositions of fusion proteins are provided in this disclosure. Pharmaceutical compositions of this disclosure generally comprise a fusion protein provided herein in combination with a pharmaceutically acceptable carrier, excipient, or diluent. Such carriers will be nontoxic to recipients at the dosages and concentrations employed. Pharmaceutically acceptable carriers for therapeutic use are well known in the pharmaceutical art, and are described, for example, in Remington's Pharmaceutical Sciences, Mack Publishing Co. (A. R. Gennaro (Ed.) 1985). For example, sterile saline and phosphate buffered saline at physiological pH may be used. Preservatives, stabilizers, dyes and the like may be provided in the pharmaceutical composition. For example, sodium benzoate, sorbic acid, or esters of p-hydroxybenzoic acid may be added as preservatives. Id. at 1449. In addition, antioxidants and suspending agents may be used. Id. The compounds of the present invention may be used in either the free base or salt forms, with both forms being considered as being within the scope of the present invention.

[0217] Pharmaceutical compositions may also contain diluents such as buffers, antioxidants such as ascorbic acid, low molecular weight (less than about 10 residues) polypeptides, proteins, amino acids, carbohydrates (e.g., glucose, sucrose, dextrins), chelating agents (e.g., EDTA), glutathione and other stabilizers and excipients. Neutral buffered saline or saline mixed with nonspecific serum albumin are exemplary diluents. Preferably, the product is formulated as a lyophilizate using appropriate excipient solutions (e.g., sucrose) as diluents.

[0218] Also contemplated is the administration of fusion protein compositions of this disclosure in combination with a second agent. A second agent may be one accepted in the art as a standard treatment for a particular disease state or disorder, such as in transplants, inflammation, and autoimmunity. Exemplary second agents contemplated include steroids, NSAIDs, mTOR inhibitors (e.g., rapamycin (sirolimus), temsirolimus, deforolimus, everolimus, zotarolimus, curcumin, farnesylthiosalicylic acid), calcineurin inhibitors (e.g., cyclosporine, tacrolimus), anti-metabolites (e.g., mycophenolic acid, mycophenolate mofetil), polyclonal antibodies (e.g., anti-thymocyte globulin), monoclonal antibodies (e.g., daclizumab, basiliximab), or other active and ancillary agents, or any combination thereof.

[0219] “Pharmaceutically acceptable salt” refers to a salt of a fusion protein, SMIP, or antibody of this disclosure that is pharmaceutically acceptable and that possesses the desired pharmacological activity of the parent compound. Such salts include the following: (1) acid addition salts, formed with inorganic acids such as hydrochloric acid, hydrobromic acid, sulfuric acid, nitric acid, phosphoric acid, and the like; or formed with organic acids such as acetic acid, propionic acid, hexanoic acid, cyclopentanepropionic acid, glycolic acid, pyruvic acid, lactic acid, malonic acid, succinic acid, malic acid, maleic acid, fumaric acid, tartaric acid, citric acid, benzoic acid, 3-(4-hydroxybenzoyl)benzoic acid, cinnamic acid, mandelic acid, methanesulfonic acid, ethanesulfonic acid, 1,2-ethane-disulfonic acid, 2-hydroxyethanesulfonic acid, benzenesulfonic acid, 4-chlorobenzenesulfonic acid, 2-naphthalenesulfonic acid, 4-toluenesulfonic acid, camphorsulfonic acid, 4-methylbicyclo[2.2.2]-oct-2-ene-1-carboxylic acid, glucoheptonic acid, lauryl sulfuric acid, 3-phenylpropionic acid, trimethylacetic acid, tertiary butylacetic acid, gluconic acid, glutamic acid, hydroxynaphthoic acid, salicylic acid, stearic acid, muconic acid, and the like; or (2) salts formed when an acidic proton present in the parent compound either is replaced by a metal ion, e.g., an alkali metal ion, an alkaline earth ion, or an aluminum ion; or coordinates with an organic base such as ethanolamine, diethanolamine, triethanolamine, N-methylglucamine, or the like.

[0220] In particular illustrative embodiments, a fusion protein of this disclosure is administered intravenously by, for example, bolus injection or infusion. Routes of administration in addition to intravenous include oral, topical, parenteral (e.g., sublingually or buccally), sublingual, rectal, vaginal, and intranasal. The term parenteral as used herein includes subcutaneous injections, intravenous, intramuscular, intrasternal, intracavernous, intrathecal, intrameatal, intraurethral injection or infusion techniques. The pharmaceutical composition is formulated so as to allow the active ingredients contained therein to be bioavailable upon administration of the composition to a patient. Compositions administered to a patient can take the form of one or more dosage units, where, for example, a tablet may be a single dosage unit, or a container of one or more compounds of this disclosure in aerosol form may hold a plurality of dosage units.

[0221] For oral administration, an excipient and/or binder may be present, such as sucrose, kaolin, glycerin, starch dextran, cyclodextrin, sodium alginate, carboxy methylcellulose, and ethyl cellulose. Sweetening agents, preservatives, dye/colorant, flavor enhancer, or any combination thereof may optionally be present. A coating shell may also optionally be employed

[0222] In a composition intended to be administered by injection, one or more of a surfactant, preservative, wetting agent, dispersing agent, suspending agent, buffer, stabilizer, isotonic agent, or any combination thereof may optionally be included.

[0223] For nucleic acid-based formulations, or for formulations comprising expression products according to this disclosure, about 0.01 μg/kg to about 100 mg/kg body weight will be administered, for example, by the intradermal, subcutaneous, intramuscular, or intravenous route, or by any route known in the art to be suitable under a given set of circumstances. A preferred dosage, for example, is about 1 μg/kg to about 20 mg/kg, with about 5 μg/kg to about 10 mg/kg particularly preferred. It will be evident to those skilled in the art that the number and frequency of administration will be dependent upon the response of the host.

[0224] The pharmaceutical compositions of this disclosure may be in any form that allows for administration to a patient, such as, for example, in the form of a solid, liquid, or gas (aerosol). The composition may be in the form of a liquid, e.g., an elixir, syrup, solution, emulsion or suspension. The liquid may be for oral administration or for delivery by injection, as two examples.

[0225] A liquid pharmaceutical composition as used herein, whether in the form of a solution, suspension or other like form, may include one or more of the following components: sterile diluents such as water for injection, saline solution, preferably physiological saline, Ringer's solution, isotonic sodium chloride, fixed oils such as synthetic mono or diglycerides that may serve as the solvent or suspending medium, polyethylene glycols, glycerin, propylene glycol or other solvents; antibacterial agents such as benzyl alcohol or methyl paraben; antioxidants such as ascorbic acid or sodium bisulfite; chelating agents such as ethylenediaminetetraacetic acid; buffers such as acetates, citrates or phosphates and agents for the adjustment of tonicity such as sodium, chloride, or dextrose. The parenteral preparation can be enclosed in ampoules, disposable syringes or multiple dose vials made of glass or plastic. Physiological saline is a preferred additive. An injectable pharmaceutical composition is preferably sterile.

[0226] It may also be desirable to include other components in the preparation, such as delivery vehicles including aluminum salts, water-in-oil emulsions, biodegradable oil vehicles, oil-in-water emulsions, biodegradable microcapsules, and liposomes. Examples of adjuvants for use in such vehicles include N-acetylmuramyl-L-alanine-D-isoglutamine (MDP), lipopolysaccharides (LPS), glucan, IL-12, GM-CSF, γ-interferon, and IL-15.

[0227] While any suitable carrier known to those of ordinary skill in the art may be employed in the pharmaceutical compositions of this disclosure, the type of carrier will vary depending on the mode of administration and whether a sustained release is desired. For parenteral administration, the carrier may comprise water, saline, alcohol, a fat, a wax, a buffer, or any combination thereof. For oral administration, any of the above carriers or a solid carrier, such as mannitol, lactose, starch, magnesium stearate, sodium saccharine, talcum, cellulose, glucose, sucrose, magnesium carbonate, or any combination thereof, may be employed.

[0228] This disclosure contemplates a dosage unit comprising a pharmaceutical composition of this disclosure. Such dosage units include, for example, a single-dose or a multi-dose vial or syringe, including a two-compartment vial or syringe, one comprising the pharmaceutical composition of this disclosure in lyophilized form and the other a diluent for reconstitution. A multi-dose dosage unit can also be, e.g., a bag or tube for connection to an intravenous infusion device.

[0229] This disclosure also contemplates a kit comprising a pharmaceutical composition of this disclosure in unit dose, or multi-dose, container, e.g., a vial, and a set of instructions for administering the composition to patients suffering a disorder such as a disorder described above.

### EXAMPLES

### Monoclonal Antibodies and Exemplary Single Chain Fusion Proteins

[0230] Exemplary monoclonal antibodies (binding domains from which, and variants thereof, were used to make exemplary single chain fusion proteins) and single chain fusion proteins are briefly described herein.

[0231] Cris-7 (also referred to as Cris-7 mAb or Cris-7 FL) is a mouse anti-human CD3ε IgG2a monoclonal antibody (mAb) (Reinherz, E. L. et al. (eds.), Leukocyte typing II., Springer Verlag, New York, (1986)). The Cris-7 mAb was shown to bind to human, baboon, cynomolgous, and rhesus T cells (data not shown). Each of the Cris-7 single chain fusion proteins described herein was also shown to have this cross-species reactivity (data not shown).

[0232] Chimeric and humanized Cris-7 IgG1-N297A (SEQ ID NOS:265, 270, 275, 280, 285, 290, 295) comprise from amino-terminus to carboxyl-terminus: a chimeric or humanized Cris-7 heavy chain variable region, a linker that comprises three (Gly)-4-Ser linked in tandem, chimeric or humanized Cris-7 light chain variable region, a mutated IgG1 hinge region (SCC—P), the C_{H2} region of human IgG1 with an alanine substitution at position 297, and the C_{H3} region of human IgG1.

[0233] Chimeric and humanized Cris-7 IgG1-AA-N297A (SEQ ID NOS:266, 271, 276, 281, 286, 291, 296) comprise from amino-terminus to carboxyl-terminus: a chimeric or humanized Cris-7 heavy chain variable region, a linker that comprises three (Gly)-4-Ser linked in tandem, chimeric or humanized Cris-7 light chain variable region, a mutated IgG1 hinge region (SCC—P), the C_{H2} region of human IgG1 with four alanine substitutions at positions L234, L235, G237 and N297 and a deletion at G236 (i.e., LLGG(234-237)AAA), and the C_{H3} region of human IgG1.

[0234] Chimeric and humanized Cris-7 IgG2-AA-N297A (SEQ ID NOS:267, 272, 277, 282, 287, 292, 297) comprise from amino-terminus to carboxyl-terminus: a chimeric or humanized Cris-7 heavy chain variable region, a linker that comprises three (Gly)-4-Ser linked in tandem, chimeric or humanized Cris-7 light chain variable region, a mutated IgG1 hinge region (SCC—P), the C_{H2} region of human IgG2 with three alanine substitutions at positions V234, G236 and N297, and the C_{H3} region of human IgG2.

[0235] Chimeric and humanized Cris7 IgG4-AA-N297A (SEQ ID NOS:268, 273, 278, 283, 288, 293, 298) comprise from amino-terminus to carboxyl-terminus: a chimeric or humanized Cris-7 heavy chain variable region, a linker that comprises three (Gly)-4-Ser linked in tandem, chimeric or humanized Cris-7 light chain variable region, a mutated IgG1 hinge region (SCC—P), the C_{H2} region of human IgG4 with four alanine substitutions at positions F234, L235, G237 and N297 and a deletion at G236 (i.e., FLGG(234-237)AAA), and the C_{H3} region of human IgG4.

[0236] Chimeric and humanized Cris-7 HM1 (SEQ ID NOS:269, 274, 279, 284, 289, 294, 299) comprise from amino-terminus to carboxyl-terminus: a chimeric or humanized Cris-7 heavy chain variable region, a linker that comprises at least three (Gly)-4-Ser linked in tandem, Cris-7 light chain variable region, wild type human IgG1 hinge region, the C_{H3} region from human IgM, and the C_{H3} region from human IgG1, and a tail sequence that comprises three copies of the FLAG epitope, one copy of the AVI tag, and six histidines.

[0237] BC3 (also referred to as BC3 mAb or BC3 FL) is a non-mitogenic mouse anti-human CD3ε IgG2b mAb (Anasetti et al., J. Exp. Med. 172: 1691-1700, 1990).

[0238] BC3-HM1 (also referred to as “BC3 HM1”) (SEQ ID NO:84) comprises from its amino-terminus to carboxyl-terminus: BC3 heavy chain variable region, a linker that comprises at least three (Gly)-4-Ser linked in tandem, BC3 light chain variable region, wild type human IgG1 hinge region, the C_{H3} region from human IgM, and the C_{H3} region from human IgG1, and a tail sequence that comprises three copies of the FLAG epitope, one copy of the AVI tag, and six histidines.

[0239] BC3-ΔC_{H2} (also referred to as “BC3 ΔC_{H2}”) (SEQ ID NO:85) comprises from its amino-terminus to carboxyl-terminus: BC3 heavy chain variable region, a linker that comprises at least three (Gly)-4-Ser linked in tandem, BC3 light chain variable region, wild type IgG1 hinge region, the C_{H3} region of human IgG1, and a tail sequence that comprises three copies of the FLAG epitope, one copy of the AVI tag, and six histidines.

[0240] BC3-G1 N297A (also referred to as “BC3 N297A”) (SEQ ID NO:80) comprises from its amino-terminus to carboxyl-terminus: BC3 heavy chain variable region, a linker that comprises three (Gly)-4-Ser linked in tandem, BC3 light chain variable region, a mutated IgG1 hinge region (SCC—P), the C_{H2} region of human IgG1 with an alanine substitution at the asparagine of position 297, and the C_{H3} region of human IgG1.

[0241] BC3-G1 AA N297A (also referred to as “BC3 IgG1AA”) (SEQ ID NO:81) comprises from its amino terminus to carboxyl terminus: BC3 heavy chain variable region, a linker that comprises three (Gly)-4-Ser linked in tandem, BC3 light chain variable region, a mutated IgG1 hinge region (SCC—P), the C_{H2} region of human IgG1 with four alanine substitutions at positions L234, L235, 237 and N297 and a deletion at G236 (i.e., LLGG(234-237)AAA), and the C_{H3} region of human IgG1.

[0242] BC3-G2 AA N297A (also referred to as “BC3 IgG2AA”) (SEQ ID NO:82) comprises from its amino terminus to carboxyl terminus: BC3 heavy chain variable region, a linker that comprises three (Gly)-4-Ser linked in tandem, BC3 light chain variable region, a mutated IgG1 hinge region (SCC—P), the C_{H2} region of human IgG2 with three alanine substitutions at positions V234, G236 and N297, and the C_{H3} region of human IgG2.

[0243] BC3-G4 AA N297A (also referred to as “BC3 IgG4AA”) (SEQ ID NO:83) comprises from its amino terminus to carboxyl terminus: BC3 heavy chain variable region, a linker that comprises three (Gly)-4-Ser linked in tandem, BC3 light chain variable region, a mutated IgG1 hinge region (SCC—P), the C_{H2} region of human IgG4 with four alanine substitutions at positions F234, L235, G237 and N297 and a deletion at G236 (i.e., FLGG(234-237)AAA), and the C_{H3} region of human IgG4.

[0244] OKT3 (also referred to as OKT3 mAb or OKT3 FL) is a mitogenic mouse anti-human CD3ε IgG2a mAb (Ortho Multicencer Transplant Study Group, N. Engl. J. Med. 313: 337, 1985).

[0245] OKT3-HM1 (also referred to as “OKT3 HM1”) (SEQ ID NO:92) comprises from its amino-terminus to carboxyl-terminus: OKT3 heavy chain variable region, a linker that comprises at least three (Gly)-4-Ser linked in tandem, OKT3 light chain variable region, wild type human IgG1 hinge region, the C_{H3} region from human IgM, and the C_{H3} region from human IgG1, and a tail sequence that comprises three copies of the FLAG epitope, one copy of the AVI tag, and six histidines.

[0246] OKT3-ΔC_{H2} (also referred to as “OKT ΔC_{H2}”) (SEQ ID NO:93) comprises from its amino-terminus to carboxyl-terminus: OKT3 heavy chain variable region, a linker that comprises at least three (Gly)-4-Ser linked in tandem, OKT3 light chain variable region, wild type IgG1 hinge region, the C_{H3} region of human IgG1, and an additional tail sequence that comprises three copies of the FLAG epitope, one copy of the AVI tag, and six histidines.

[0247] OKT3-G1 N297A (also referred to as “OKT N297A”) (SEQ ID NO:88) comprises from its amino-terminus to carboxyl-terminus: OKT3 heavy chain variable region, a linker that comprises three (Gly)-4-Ser linked in tandem, OKT3 light chain variable region, a mutated IgG1 hinge region (SCC—P), the C_{H2} region of human IgG1 with an alanine substitution at position 297, and the C_{H3} region of human IgG1.

[0248] OKT3-G1 AA N297A (also referred to as “OKT3 IgG1AA”) (SEQ ID NO:89) comprises from its amino terminus to carboxyl terminus: a leader sequence derived from human 2H7 leader sequence, OKT3 heavy chain variable region, a linker that comprises three (Gly)-4-Ser linked in tandem, OKT3 light chain variable region, a mutated IgG1 hinge region (SCC—P), the C_{H2} region of human IgG1 with four alanine substitutions at positions L234, L235, G237 and N297 and a deletion at G236 (i.e., LLGG(234-237)AAA), and the C_{H3} region of human IgG1.

[0249] OKT3-G2 AA N297A (also referred to as “OKT3 IgG2AA”) (SEQ ID NO:90) comprises from its amino terminus to carboxyl terminus: OKT3 heavy chain variable region, a linker that comprises three (Gly)-4-Ser linked in tandem, OKT3 light chain variable region, a mutated IgG1 hinge region (SCC—P), the C_{H2} region of human IgG2 with three alanine substitutions at positions V234, G236 and N297, and the C_{H3} region of human IgG2.

[0250] OKT3-G4 AA N297A (also referred to as “OKT3 IgG4AA”) (SEQ ID NO:91) comprises from its amino terminus to carboxyl terminus: OKT3 heavy chain variable region, a linker that comprises three (Gly)-4-Ser linked in tandem, OKT3 light chain variable region, a mutated IgG1 hinge region (SCC—P), the C_{H2} region of human IgG4 with four alanine substitutions at positions F234, L235, G237 and N297 and a deletion at G236 (i.e., FLGG(234-237)AAA), and the C_{H3} region of human IgG4.

[0251] Also made and tested were OKT3 IgG4-N297A (i.e., the C_{H2} region of human IgG4 having only the N297A substitution, also known as OKT3 IgG4-WT-N297A or OKT3 IgG4-FLGG-N297A; SEQ ID NO:232, which sequence includes a 22 amino acid leader sequence that is not a part of the mature fusion protein). Also, single alanine substitution mutations at each of the four positions (F234, L235, G236 and G237) in combination with the N297A substitution were made (i.e., OKT3 IgG4-ALGG-N297A, OKT3 IgG4-FAGG-N297A, OKT3 IgG4-FLAG-N297A, and OKT3 IgG4-FLGA-N297A, which correspond to SEQ ID NOS:234, 236, 238, and 240, respectively—these also include a 22 amino acid leader sequence that is not a part of the mature fusion protein).

[0252] OKT3 ala-ala (also referred to as OKT3 AA-FL or OKT3 FL) is a humanized, Fc mutated anti-CD3 mAb that contains alanine substitutions at positions 234 and 235 (Herold et al. (2003) J. Clin. Invest. 11(3): 409-18).

[0253] Visilizumab (also referred to as “Nuvion FL”) is a humanized, Fc mutated anti-CD3 mAb directed against the CD3ε chain of the TCR. It is a human IgG2 isotype and contains mutations at positions 234 and 237 (Carpenter et al., Blood 99: 2712-9, 2002).

[0254] H57-457 mAb is a hamster anti-TCR monoclonal antibody. It is mitogenic and functions similarly to OKT3 monoclonal antibody (Lavasani et al. (2007) Scandinavian Journal of Immunology 65:39). The sequences of V_{H} and V_{L} regions of H57-457 mAb are set forth in SEQ ID NOS:49 and 51.

[0255] H57 half null (SEQ ID NO:304) is a mouse IgG2a single chain fusion protein having H57 binding domain and with mutations in C_{H2} that cause the loss of ADCC activities in addition to the N297A substitution. It comprises from its amino terminus to carboxy terminus: H57 heavy chain variable region, a linker that comprises three (Gly)-4-Ser linked in tandem, H57 light chain variable region, a wild type mouse IGHG2c hinge region, the C_{H2} region of mouse IGHG2c with four alanine substitutions at positions L234, L235, G237, and N297, and the C_{H3} region of mouse IGHG2c.

[0256] H57 HM2 (SEQ ID NO:306) is a mouse single chain fusion protein that comprises from its amino terminus to carboxy terminus: H57 heavy chain variable region, a linker that comprises three (Gly)-4-Ser linked in tandem, H57 light chain variable region, a wild type mouse IGHG2c hinge region, the mouse C_{H3μ} region, and the mouse C_{H3γ} region.

[0257] H57Null2 (SEQ ID NO:96) is a mouse IgG2a single chain fusion protein having H57 binding domain and with mutations in C_{H2} that cause the loss of ADCC and CDC activities. It comprises from its amino terminus to carboxy terminus: H57 heavy chain variable region, a linker that comprises three (Gly)-4-Ser linked in tandem, H57 light chain variable region, a wild type mouse IGHG2c hinge region, the C_{H2} region of mouse IGHG2c with six alanine substitutions at positions L234, L235, G237, E318, K320, and K322, and the C_{H3} region of mouse IGHG2c.

[0258] 145-2C11 mAb (also referred to as 2C11 mAb) is a hamster monoclonal antibody against the CD3ε chain of the murine TCR complex (Hirsch et al., J. Immunol. 140: 3766, 1988). It is also mitogenic and functions similar to OKT3 monoclonal antibody. The sequences of V_{H} and V_{L} regions of 145-2C11 mAb are set forth in SEQ ID NOS:58 and 60.

[0259] 2C11 Null2 (SEQ ID NO:56) is a mouse IgG2a single chain fusion protein having 2C11 binding domain and with mutations in C_{H2} which cause the loss of ADCC and CDC activities. It comprises from its amino terminus to carboxy terminus: 2C11 heavy chain variable region, a linker that comprises three (Gly)-4-Ser linked in tandem, 2C11 light chain variable region, a wild type mouse IGHG2c hinge region, the C_{H2} region of mouse IGHG2c with six alanine substitutions at positions L234, L235, G237, E318, K320, and K322, and the C_{H3} region of mouse IGHG2c.

### Example 1

### Fusion Proteins do not Activate Primed T Cells or Induce Cytokine Release by Primed T Cells or Accessory Cells

### Isolation of Human Peripheral Blood Mononuclear Cells (PBMC)

[0260] Fresh human whole blood was obtained in 30 mL syringes containing heparin (up to 25 mL blood per syringe) and was kept at room temperature up 2 hours before processing. The blood was diluted in a 50 mL conical tube with an equal volume of room temperature RPMI-1640 (no supplements). The diluted blood was mixed 2 to 3 times by gentle inversion. Using a 25 mL pipette, 20 to 25 mL of the diluted blood was layered carefully over 15 mL of Lymphocyte Separation Media (MP Biomedicals) contained in a 50 mL conical tube. The tubes were centrifuged at 400 g for 30 minutes at room temperature. Cells were collected from the interface of the density gradient and were combined in a 50 mL conical tube, with no more than 30 mL of cell suspension per tube. The tubes containing the cell suspensions were filled with RPMI-1640 containing 10% FBS, 100 U/mL penicillin, 100 ug/mL Streptomycin, and 2 mM L-glutamine (Complete RPMI-1640). The tubes were centrifuged at 1500 rpm for 5 minutes at room temperature and the supernatant was aspirated. The cells were washed twice by resuspending them in 20 mL of Complete RPMI, centrifuging at 1500 rpm for 5 minutes at room temperature, and aspirating the supernatant. The washed cells were counted by hemacytometer and resuspended according the assay protocol for which they were being used.

Labeling Human PBMC with Carboxyfluorescein Succinimidyl Ester (CFSE)

[0261] The density of mouse splenocytes was adjusted to 1×10⁶/mL in sterile PBS. The cells were distributed into 50 mL conical tubes with no more than 25 mL (25×10⁶ cells) per tube. The cells were labeled with CFSE using the CELLTRACE™ CFSE Cell Proliferation Kit (Molecular Probes), after optimizing conditions for use. A 5 mM solution of CFSE in tissue culture grade DMSO was prepared immediately before use by adding 18 uL of high grade DMSO (Component B of kit) to a vial containing 50 μg of lyophilized CFSE (Component A of kit). The CFSE solution was added to the PBMC cell suspensions to a final concentration of 50 nM CFSE, then the cell suspensions were incubated at 37° C. in 5% CO₂ for 15 minutes. The cell labeling reaction was quenched by filling the tubes with RPMI Complete (RPMI-1640 containing 10% FBS, 100 U/mL penicillin, 100 ug/mL Streptomycin, and 2 mM L-glutamine). The cells were spun at 1500 rpm for 7 minutes at room temperature. The supernatant was aspirated from each tube and the cells were re-suspended in RPMI Complete. The cells were counted and adjusted in RPMI Complete to the desired density for use in assays.

Analysis of Mitogenicity and Cytokine Release Using PHA-Primed T cells

[0262] Human PBMC were suspended at a concentration of 2×10⁶ cells/mL in complete RPMI media (RPMI-1640 containing 10% Human AB serum, 100 U/mL penicillin, 100 μg/mL Streptomycin, and 2 mM L-glutamine) and stimulated with 2.5 μg/mL of PHA (Sigma) at 37° C. for 3 days. After incubation, cells were washed twice with complete RPMI and re-plated at a concentration of about 2×10⁶ cells/mL in a new flask with no stimulation. Cells were then placed at 37° C. for an additional 4 days, allowing the T cells to rest before exposure to a secondary stimulus. At the end of this 4 day rest period, cells were harvested, washed with PBS, and labeled with CFSE as previously described. After labeling, cells were suspended at a concentration of 2×10⁶ cells/ml in complete (human serum) RPMI (RPMI-1640 containing 10% human AB serum, 100 U/mL penicillin, 100 ug/mL Streptomycin, and 2 mM L-glutamine). At this time, fresh PBMCs were isolated from the same donor and used as accessory cells for restimulation. To prepare the accessory cells, T cells were magnetically separated from the PBMC population using the EasySep technology (Stem Cell Technologies Cat# 18051). Magnetic nanoparticles along with dextran and a cocktail of antibodies directed against CD3 were incubated with the freshly isolated PBMCs according to the manufacturer's protocol. The cell and bead mixture was then left in a first tube with EasySep Purple magnet for 5 minutes and then the cell suspension was poured into a second 5 mL FACS tube. The CD3⁺ cells (T cells) were retained in the first tube, while the accessory cells were transferred into the second tube. The negatively selected accessory cells were treated with mitomycin C (MMC, as described below) to inhibit proliferation. Both CFSE-labeled PHA blasts and MMC treated accessory cells were suspended in complete (human AB serum) RPMI at 2×10⁶ cells/mL. Each cell population was added to a 48-well tissue culture plate (0.5 mL/well) along with the indicated treatments. Cells were incubated for an additional 4 days at 37° C. and 50 μL of supernatant was harvested at 24 hrs after stimulation. The cells and remaining supernatant were harvested on Day 4 post-restimulation. Harvested cells were stained with fluorescently tagged antibodies against CD5 (340697, BDBiosciences) CD25 (557741, BDBiosciences) and 7AAD (559925, BD Biosciences) and run through a flow cytometer (LSRII, Becton Dickenson). Data was analyzed using FlowJo flow cytometry software (TreeStar). The gating strategy was as follows: cells that fell within a forward scatter (FSC): side scatter (SSC) lymphocyte gate were analyzed for 7AAD expression. Cells that fell into the 7AAD negative gate were then analyzed for CD5 expression, and cells that were within the CD5+ gate were then analyzed for CFSE dilution and CD25 upreguation. Cells that were CD5+, CFSE^{lo} and CD25^{hi} were considered activated T cells. Supernatant samples were analyzed for the presence of cytokines and chemokines using a custom 11-plex Luminex-based detection kit from Millipore (Milliplex series), following the manufacturer's procotol. The 11 analytes detected by the kit were: IL-13, IL-1RA, IL-2, IL-4, IL-6, IL-10, IL-17, IP-10, MCP1, IFNγ, and TNFα.

[0263] FIG. 1 shows that the OKT3 IgG2AA, OKT3 IgG4AA, and OKT3 HM1 fusion proteins did not activate PHA-primed T cells as compared to known antibodies visilizumab and OKT3 ala-ala. Similar data were generated with molecules containing the BC3 binding domain.

[0264] Table 1 shows that OKT3 IgG2AA, OKT3 IgG4AA and OKT3 HM1 fusion proteins did not induce cytokine release by primed T cells or accessory cells, in contrast to known antibodies visilizumab and OKT3 ala-ala.

TABLE 1
Cytokine Data

| | | | IL-1b | IL-2 | IL-4 | IL-6 | IL-10 | IL-17 | IFN-g | TNF-a | MCP-1 | IP-10 | IL-1RA |
|---|---|---|---|---|---|---|---|---|---|---|---|---|---|
| untreated | | | 20.0 | 2.1 | 7.4 | 1580.4 | 469.6 | 27.1 | 13.6 | 195.2 | 1393.9 | 234.1 | 4227.5 |
| PHA | 2.5 | ug/mL | 22.9 | 7.7 | 53.6 | 2293.6 | 1498.1 | 59.4 | 41.9 | 159.7 | 1467.2 | 625.0 | 5760.6 |
| OKT3 mAb | 10 | ug/mL | 77.6 | 101.0 | 168.0 | 3300.2 | 8196.0 | 203.0 | 971.6 | 877.9 | 2310.7 | 1010.7 | 9097.7 |
| BC3 mAb | 10 | ug/mL | 14.7 | 0.2 | 1.1 | 1440.0 | 332.5 | 3.2 | 1.8 | 222.7 | 1899.4 | 73.9 | 4330.3 |
| IgG2a | 10 | ug/mL | 46.1 | 3.5 | 6.4 | 3926.0 | 980.7 | 36.7 | 31.4 | 281.9 | 1566.5 | 368.8 | 5503.0 |
| OKT3 N297A | 7.3 | ug/ml | 44.5 | 1.5 | 6.2 | 1677.8 | 401.8 | 17.8 | 17.7 | 341.9 | 1702.5 | 272.9 | 8803.2 |
| | .73 | ug/ml | 31.5 | 3.2 | 14.6 | 1625.5 | 649.9 | 35.7 | 35.9 | 365.0 | 1508.5 | 433.3 | 8523.6 |
| | .073 | ug/ml | 26.8 | 6.5 | 31.7 | 1784.8 | 1642.0 | 67.2 | 74.8 | 358.3 | 1637.3 | 775.6 | 8072.2 |
| OKT3 IgG1AA | 7.3 | ug/ml | 474.4 | 0.8 | 5.0 | 21297.4 | 9133.1 | 6.6 | 142.5 | 2082.9 | 2973.3 | 111.4 | 10077.3 |
| | .73 | ug/ml | 109.8 | 0.3 | 3.7 | 14723.7 | 2088.2 | 5.8 | 17.3 | 375.2 | 1777.4 | 145.5 | 5081.0 |
| | .073 | ug/ml | 24.6 | 0.6 | 3.9 | 1805.7 | 454.6 | 13.0 | 13.2 | 180.7 | 1401.7 | 352.3 | 4188.9 |
| OKT3 IgG2AA | 7.3 | ug/ml | 19.8 | 0.4 | 4.1 | 1345.3 | 280.2 | 4.0 | 1.5 | 144.8 | 1675.2 | 106.6 | 3884.5 |
| | .73 | ug/ml | 19.6 | 0.4 | 3.2 | 1701.8 | 278.9 | 5.1 | 3.2 | 126.9 | 1518.3 | 143.7 | 3152.2 |
| | .073 | ug/ml | 17.9 | 0.7 | 2.8 | 1659.4 | 305.3 | 11.4 | 6.9 | 160.7 | 1517.7 | 282.3 | 3586.4 |
| OKT3 IgG4AA | 7.3 | ug/ml | 20.3 | 0.3 | 2.6 | 1632.4 | 265.0 | 4.1 | 2.1 | 140.4 | 1081.2 | 76.8 | 3020.9 |
| | .73 | ug/ml | 17.6 | 0.4 | 0.5 | 1532.5 | 249.8 | 6.2 | 4.9 | 155.3 | 1281.8 | 231.8 | 3639.6 |
| | .073 | ug/ml | 24.5 | 0.4 | 0.0 | 1470.7 | 294.7 | 9.2 | 5.9 | 163.7 | 1307.5 | 167.1 | 3346.4 |
| OKT3 HM1 | 7.3 | ug/ml | 9.2 | 0.2 | 3.2 | 862.1 | 185.6 | 1.2 | 0.8 | 122.4 | 1128.9 | 34.8 | 3118.8 |
| | .73 | ug/ml | 13.7 | 0.2 | 1.1 | 1045.2 | 233.8 | 1.6 | 0.8 | 131.1 | 986.7 | 40.2 | 3284.7 |
| | .073 | ug/ml | 17.3 | 0.6 | 0.0 | 1743.4 | 274.3 | 8.2 | 2.4 | 149.1 | 1216.2 | 107.4 | 3260.2 |
| Nuvion FL | 10 | ug/ml | 12.8 | 7.9 | 63.0 | 2149.0 | 2132.3 | 65.9 | 92.6 | 245.9 | 1732.0 | 972.5 | 7923.9 |
| | 1 | ug/ml | 18.7 | 10.0 | 57.1 | 1936.9 | 2129.4 | 78.1 | 100.6 | 245.8 | 1791.8 | 1207.6 | 6553.7 |
| | .1 | ug/ml | 19.8 | 7.6 | 43.8 | 2204.3 | 2076.4 | 73.5 | 99.0 | 274.9 | 1273.0 | 1386.4 | 7469.3 |
| OKT3 ala-ala FL | 10 | ug/ml | 38.2 | 6.9 | 44.4 | 2033.5 | 2052.8 | 82.1 | 185.6 | 373.7 | 2309.6 | 720.8 | 7791.7 |
| | 1 | ug/ml | 32.3 | 6.8 | 43.2 | 2958.7 | 1999.5 | 82.7 | 102.6 | 392.7 | 2812.7 | 841.2 | 8950.2 |
| | .1 | ug/ml | 28.0 | 7.3 | 32.0 | 2710.9 | 1595.1 | 74.0 | 66.4 | 268.7 | 2692.8 | 631.8 | 6825.3 |

### Example 2

### Fusion Proteins Block a T Cell Response to Alloantigen

### Human Mixed Lymphocyte Reaction (MLR)

[0265] Human PBMCs from two donors were isolated as described previously and kept separate. Based on previous studies, PBMCs from one donor were slated to be the stimulator population and PBMCs for the second donor were used as the responder population. Cells from both donors were labeled with CFSE as previously described. The PBMCs from the donor to be used as the stimulator were treated with mitomycin C (MMC) to prevent cell division. MMC (Sigma) was resuspended in complete (HS) RPMI media (RPMI-1640 containing 10% human AB serum, 100 U/mL penicillin, 100 ug/mL Streptomycin, and 2 mM L-glutamine) at a concentration of 0.5 mg/mL. PBMCs were resuspended at a concentration of about 1×10⁶/mL and MMC was added to a final concentration of 25 μg/mL. The cell and MMC mixture was then incubated at 37° C. for 30 minutes after which time cells were washed thrice with complete (HS) RPMI media. Prepared stimulator and responder cells were suspended at a concentration of about 2×10⁶/mL in complete (human AB serum) RPMI (RPMI-1640 containing 10% human AB serum, 100 U/mL penicillin, 100 μg/mL Streptomycin, and 2 mM L-glutamine) and 0.25 mL of each cell population was added per well of a 48-well plate. All treatments were added to the plate at the same time as the cells (at the concentrations shown in FIGS. 2, 3, and 17; note that the concentrations given are for antibodies and that molar equivalent concentrations were used for the fusion proteins as shown in FIG. 17) and samples were then incubated at 37° C. for the duration of the experiment. Experiments were harvested 7-8 days after set-up. Harvested cells were stained with fluorescently tagged antibodies against CD5 (340697, BDBiosciences), CD25 (555433, BDBiosciences), and 7AAD (559925, BD Biosciences), and run on a flow cytometer (LSRII, Becton Dickenson). Data was analyzed using FlowJo flow cytometry software (TreeStar). The gating strategy was as follows: cells that fell within a FSC:SSC lymphocyte gate were analyzed for 7AAD expression. Cells that fell within the negative 7AAD gate were then analyzed for CD5+ expression, and cells that were CD5+ were then analyzed for CFSE dilution and CD25 up-regulation. Cells that were CD5+, CFSE^{lo} and CD25^{hi} were considered activated T cells.

[0266] FIG. 2 shows that the BC3 IgG2AA and BC3 IgG4AA fusion proteins blocked a T cell response to alloantigen better than known BC3 mAB and in contrast to OKT3 ala-ala antibody. Similar data were generated with molecules expressing the OKT3 binding domain.

[0267] FIG. 3 shows that the BC3 HM1 and BC3 ΔC_{H2} fusion proteins also blocked a T cell response to alloantigen. Similar data were generated with molecules expressing the OKT3 binding domain.

[0268] FIG. 17 shows that a partially purified Cris-7 IgG1-N297A (50% is the peak of interest) effectively blocked a T cell response to alloantigen.

### Example 3

### Fusion Proteins Block Memory T Cell Response to Recall Antigen

[0269] Human PBMCs were isolated from a donor that scored positive in a previous screen for reactivity to tetanus toxoid. PBMCs were labeled with CFSE as previously described and then resuspended at a concentration of 2×10⁶/mL in complete (human AB serum) RPMI (RPMI-1640 containing 10% human AB serum, 100 U/mL penicillin, 100 μg/mL Streptomycin, and 2 mM L-glutamine). 0.5 mL of CFSE-labeled cells and 1 ug/mL of tetanus toxoid (EMD), along with experimental treatments, were added to a 48-well plate. The cells were incubated at 37° C. with 5% CO₂ for the duration of the experiment. Experiments were harvested 8 days after set-up. Harvested cells were stained with fluorescently tagged antibodies against CD5 (340697, BDBiosciences) and CD25 (555433, BDBiosciences) and run on a flow cytometer (LSRII, Becton Dickenson). Data was analyzed using FlowJo flow cytometry software (TreeStar). The gating strategy was as follows: cells that fell within a FSC:SSC lymphocyte gate were analyzed for CD5 expression, cells that subsequently fell within the CD5+ gate were then analyzed for CFSE dilution and CD25 upregulation. Cells that were CD5+, CFSE^{lo} and CD25^{hi} were considered activated T cells.

[0270] FIG. 4 shows that the BC3 IgG2AA, BC3 IgG4 AA, and BC3 HM1 fusion proteins can block a memory T cell response to a recall antigen, tetanus toxoid. Similar data were generated with fusion proteins containing the OKT3 binding domain.

### Example 4

### Fusion Proteins Induce Downmodulation of Cell Surface TCR and CD3

[0271] Human PBMCs were isolated as described in Example 1 and suspended at a concentration of about 2×10⁶ cells/mL. A portion of the PBMCs were set aside for immediate cell surface staining while the rest of the PBMCs were incubated with various anti-CD3 reagents for 4 days before analysis. PBMCs to be stained immediately were cooled on ice for 30 minutes after which they were spun down at 1500 rpm for 10 min at 4° C. and the resulting supernatant was removed. Cells were suspended in ice cold FACS Buffer (dPBS, 2.5% FBS) at a concentration of 1×10⁶/mL. 1 mL of cells was transferred into a 5 mL FACS tube (BD Falcon) for each reagent to be analyzed. An additional 1 mL of ice cold FACS Buffer was added to the 1 mL aliquots of cells and the cells were spun down at 1500 rpm for 5 minutes at 4° C. Tubes were inverted and supernatant decanted so that there was approximately 0.1 mL of FACS Buffer left in the tube along with the cell pellet and the tubes were then placed on ice. A master stock of staining antibodies (90 μL of ice cold FACS buffer, 5 μL anti-CD5 antibody (eBioscience), and 5 μL anti-TCR antibody (BDBiosciences)) was prepared to analyze samples immediately after isolation. Master stock (100 μL) was added to each FACS tube, along with 1 ug/mL, 0.5 μg/mL, or 0.1 μg/mL of the CD3-directed fusion proteins or monoclonal antibody (note that the concentrations given are for antibodies and that molar equivalent concentrations were used for the fusion proteins). The samples were then incubated on ice, in the dark for 30 minutes. After the incubation period, samples were washed twice with 2 mL ice cold FACS Buffer and a PE-labeled secondary antibody specific for the CD3-directed reagent was added at a final dilution of 1:400. The samples were then incubated on ice, in the dark for 30 minutes, and then washed twice with 2 mL ice cold FACS buffer. Staining levels were measured on an LSRII flow cytometer (Becton Dickenson).

[0272] PBMCs to be treated for 4 days and then cell surface stained were plated in 0.5 mL aliquots per well (cell concentration was about 2×10⁶ cells/mL in complete (human AB serum) RPMI media) in 48-well plates. CD3-directed reagents were added to the cells at 1, 0.5 and 0.1 μg/mL (note that the concentrations given are for antibodies and that molar equivalent concentrations were used for fusion proteins) and the cells were incubated at 37° C. for 2 to 4 days. After incubation, cells were harvested and the stained as described above.

[0273] The results (FIGS. 5A, 5B, 6A and 6B) show that fusion proteins comprising the OKT3 binding domain induce the downmodulation of both the TCR and CD3 from the surface of T cells, while OKT3 monoclonal antibody only downmodulated the TCR and not CD3. Similar results were obtained with fusion proteins comprising the BC3 binding domain.

[0274] FIG. 18 shows that the Cris-7 IgG1-N297A fusion protein induces downmodulation of both the TCR and CD3 from the T cell surface, while the Cris-7 monoclonal antibody only downmodulates the TCR. Similar results are obtained with Cris-7 IgG2-AA-N297A, Cris-7 IgG4-AA-N297A, and Cris-7 HM1.

### Example 5

### Fusion Proteins Induce a Robust Calcium Flux in T Cells

[0275] Human PBMCs were isolated as previously described. Non-T cells were magnetically separated from T cells using the MACS technology from Miltenyi. Untouched T cells were isolated with The Pan T Cell Isolation Kit II (Miltenyi). Supermagnetic beads coated with a panel of antibodies directed against all cellular subsets of PBMCs except T cells were incubated with the freshly isolated PBMCs according to the manufacturer's protocol. The cell and bead mixture was then applied to a column containing a matrix that forms a magnetic field when placed in a MACS Separater (Miltenyi), a strong permanent magnet. The T cells flow through the column while all other cells are retained in the column. T cell purity was generally between 87-93%. The purified T cells were suspended in complete RPMI (RPMI-1640, 10% human AB serum, 2 mM L-glutamine, sodium pyruvate, non-essential amino acids, penicillin/streptomycin) at a concentration of about 2×10⁶ cells/mL and incubated at 37° C. in an appropriately sized flask overnight. The following morning, 100 μl of cells (200,000 cells) were transferred into the wells of a 96-well, black, poly-D lysine plate and incubated at 37° C. for 3 hours. During this incubation time, the calcium flux indicator dye was prepared according to manufacturer's instructions (Molecular Devices FLIPR Calcium 4 assay). In addition, experimental treatments were prepared in U-bottom plates. Cell treatments were prepared at a 5× concentration in the treatment plate in a 75 μL volume. All treatments (fusion proteins and cross-linkers) were tested in triplicate. 100 μL of indicator dye was added to the cells one hour prior to reading the plate. After the addition of indicator dye, the plate was placed back in the incubator for an additional 45 minutes. Plates were then spun at 1200 rpm for 5 minutes at room temperature and then returned to the incubator for an additional 15 minutes. At the end of this incubation period, the treatment plate and cell plate were loaded into the FlexStation 3 (Molecular Devices), a benchtop plate reader with integrated fluid transfer. The Flexstation robotically added 50 uL of treatment to the cell plate and then recorded the resulting fluorescence from the calcium indicator dye every 7 seconds over the course of 750 sec. Captured data was then exported to Excel (Microsoft Office) for analysis.

[0276] The results (FIG. 7) show that, in contrast to antibodies having the same binding domain, single chain fusion proteins of this disclosure, in the absence of a cross-linker (i.e., a molecule that binds to two or more SMIP molecules, such as an anti-IgG antibody), induce a robust calcium flux in T cells. Similar results were obtained with molecule formats expressing the BC3 binding domain, as well as when primed T cells were used.

[0277] FIG. 19 shows the effect of different hinges on the level of calcium flux caused by single chain fusion proteins having the BC3 binding domain. In this case, the fusion proteins and controls were added at 20 seconds and cross-linkers were added at 600 seconds. The fusion protein with the shortest hinge (Linker 122, derived from an IgA2 hinge) caused greatest calcium flux, while the fusion proteins having longer hinges (Linkers 115 and 116, derived from an IgE C_{H2} and UBA, respectively) induced a lower level calcium flux. But, in all cases the single chain fusion proteins having the BC3 binding domain caused a greater increase in calcium flux than antibodies. The hinge, therefore, may be adjusted to modulate the calcium flux as needed.

### Example 6

### In Vitro Assessment of Anti-Mouse TCR/CD3 Molecules

### Isolation of Mouse Splenocytes

[0278] Under aseptic conditions, spleens were excised and large pieces of fat and tissue were removed. In a tissue culture hood, spleens were placed into a small dish with 5 mL of sterile 1×PBS and then ground between two single-sided frosted glass slides. During this process, slides were held at an angle over the Petri dish to allow cells and fluid to run back into the dish. This step was completed when the splenic capsule lost all red color. The cell suspension in the Petri dish was transferred to a 15 mL conical tube and vortexed to break up clumps of cells. The tube then was filled with an additional 12 mL of sterile 1×PBS, stood upright and contents were allowed to settle for 5 minutes. The supernatant was transferred to a second 15 mL conical tube, leaving the settled debris undisturbed in the first tube. The cells were then harvested at 1500 rpm for 5 minutes at room temperature. The supernatant was removed and the cell pellet was suspended in 4 mL of ACK Red Blood Cell Lysing Buffer (Quality Biologics, catalogue No. 118-156-101) and incubated at room temperature for 5 minutes. The conical tube was then filled with RPMI Complete media (RPMI-1640 containing 10% FBS, 100 U/mL penicillin, 100 μg/mL Streptomycin, and 2 mM L-glutamine). The cell suspension was filtered through a cell strainer and transferred to another 15 mL conical tube. Cells were washed three times with complete RPMI and then counted using a hemacytometer.

Labeling Mouse Splenocytes with Carboxyfluorescein Succinimidyl Ester (CFSE)

[0279] The density of mouse splenocytes was adjusted to 1×10⁶/mL in sterile PBS. The cells were distributed into 50 mL conical tubes with no more than 25 mL (25×10⁶ cells) per tube. The cells were labeled with CFSE using the CELLTRACE™ CFSE Cell Proliferation Kit from Molecular Probes (catalogue No. C34554), after optimizing conditions for use with human PBMC and mouse splenocytes. A 5 mM solution of CFSE in tissue culture grade DMSO was prepared immediately before use by adding 18 μL of high grade DMSO (Component B of kit) to a vial containing 50 μg of lyophilized CFSE (Component A of kit). Because CFSE is light sensitive, care was taken during the reagent preparation and subsequent cell labeling procedures to protect the reagent from light. The CFSE solution was added to the PBMC cell suspensions at a final concentration of 50 nM CFSE. The caps of the tubes were placed loosely over the tubes containing the cell suspensions to allow for gas exchange, and the tubes were placed in a 37° C., 5% CO₂ incubator for 15 minutes. The cell labeling reaction was quenched by filling the tubes with RPMI Complete (RPMI-1640 containing 10% FBS, 100 U/mL penicillin, 100 μg/mL Streptomycin, and 2 mM L-glutamine) as serum quenches the labeling reaction. The cells were spun at 1500 rpm for 7 minutes at room temperature. The supernatant was aspirated from each tube and the cells were re-suspended in RPMI Complete. The cells were counted (losses of up to 25% of the input are common) and adjusted in RPMI Complete to the desired density for use in assays.

### ConA Blast

[0280] Splenocytes were isolated from a BALB/c mouse as previously described and suspended at a concentration of 2×10⁶ cells/mL in complete RPMI media (RPMI, 10% FBS, 2 mM L-glutamine, sodium pyruvate, non-essential amino acids, pen/strep, and 1% BME) and stimulated with 1 ug/mL of concanavalin A (Sigma) for 3 days. After 3 days, cells are washed twice with complete RPMI and re-plated in a new flask with no stimulation for 4 days. At the end of this 4 day rest period, cells were harvested and labeled with CFSE as previously described.

[0281] At this time, a second spleen was harvested from a BALB/c mouse and the splenocytes isolated. These freshly isolated splenocytes were used as accessory cells during the restimulation phase of the experiment. To prepare the accessory cell population, T cells (CD5⁺ cells) were magnetically separated from the fresh splenocytes using the MACS technology from Miltenyi. Supermagnetic beads coated with anti-CD5 antibody (Miltenyi, catalogue No. 130-049-301) were incubated with the freshly isolated splenocytes according to the manufacturer's protocol. The cell and bead mixture was then applied a column (Miltenyi, catalogue No. 130-042-401) containing a matrix that forms a magnetic field when placed in a MACS Separator (Miltenyi, catalogue No. 130-042-301), a strong permanent magnet. The CD5⁺ cells (T cells) were retained in the column and the untouched accessory cells flowed through. The negatively selected accessory cells were treated with mitomycin C (as previously described) to inhibit proliferation.

[0282] Both CFSE-labeled ConA blast and MMC treated accessory cells were resuspended in complete media at 2×10⁶/mL. 0.5 mL of each cell population was added to a 48-well tissue culture plate along with the indicated treatments. 50 μL of supernatant was harvested at 24 hrs after stimulation and the cells and remaining supernatant were harvested on Day 4 post-restimulation. Cells were stained with fluorescently tagged antibodies against CD5 (45-0051, eBioscience) and CD25 (25-0251, eBioscience), run through a flow cytometer (LSRII, Becton Dickenson) and analyzed with FlowJo software (TreeStar). The gating strategy was as follows: cells that fell within a FSC:SSC lymphocyte gate were analyzed for CD5 expression, cells that subsequently fell within the CD5+ gate were then analyzed for CFSE dilution and CD25 upregulation. Cells that were CD5+, CFSE^{lo} and CD25^{hi} were considered activated T cells. Supernatant samples were analyzed for the presence of cytokines and chemokines using a 22 analyte, Linco-plex, Luminex-based detection kit (Linco Research) following the manufacturer's protocol with the following modifications: Analyte beads, detection antibodies, and streptavidin-PE stock solutions were diluted 1:2 prior to use in the assay. The 22 analytes detected by the kit were: MIP-1α, GMCSF, MCP-1, KC, RANTES, IFNγ, IL-1B, IL-1a, G-CSF, IP-10, IL-2, IL-4, IL-5, IL-6, IL-7, IL-10, IL-12, TNFα, IL-9, IL-13, IL-15, and IL-17.

[0283] Both H57-457 and 145-2C11 monoclonal antibodies, but not H57Null2 or 2C11 Null2 SMIP, induced cytokine release of ConA-primed T cells. The results of the release of exemplary cytokines, IFNγ and IP-10, following the treatment of ConA-primed T cells are shown in FIGS. 8A and 8B. In addition, both H57Null2 (same as “H57 Mu Null” in FIG. 9) and 2C11 Null2 SMIPs (same as “2C11 Mu null SMIP” in FIG. 9), but not H57-457 or 145-2C11 monoclonal antibody, blocked T cell response to antigen (see, FIG. 9). Similar results were obtained when the release of other cytokines were measured.

### Example 7

### In Vivo Studies of Exemplary Anti-TCR SMIPs

[0284] Twelve-week old female BALB/c mice (Harlan) were divided into groups of six and injected via the lateral tail vein with 7.3 μg, 37 μg, 75 vg, or 185 μg H57Null2 SMIP, 5 μg (highest tolerable dose) of H57 mAb, 250 μg of IgG2a isotype control (molar equivalent of the highest SMIP dose), or 200 μL of PBS. All injection volumes were 200 μL and all injected materials had an endotoxin level below 0.5 EU/mg. Three randomly-selected mice per group were terminated at 24 hours and the remaining three mice per group were terminated at the end of the experiment three days post-injection. Mice were monitored for clinical symptoms of drug-associated toxicities in the form of weight loss and increased clinical score. The scientist evaluating clinical score was blinded to the treatments administered to each group. Scores were assigned based on the following key: 0=normal; 1=Mild Piloerection; 2=Moderate Piloerection and/or Ocular Inflammation or Irritation; 3=Hunched Posture/Listlessness; 4=Moribund. All mice were bled at 2 hours post-injection and at their terminal timepoint. Spleens and inguinal lymph nodes were harvested at the terminal timepoints. Sera samples were analyzed for the presence of cytokines and chemokines using a custom 14-plex Luminex-based detection kit from Millipore (Milliplex series), following the manufacturer's protocol, with the following modifications: Analyte beads, detection antibodies, and streptavidin-PE stock solutions were diluted 1:2 prior to use in the assay. In addition, serum samples were run neat (compared to recommended 1:2 dilution). The 14 analytes detected by the kit were: G-CSF, GM-CSF, IL-2, IL-4, IL-5, IL-6, IL-10, IL-13, IL-17, IP-10, KC, MCP1, IFNγ, and TNFα. Cell suspensions from spleen and lymph nodes were stained with antibodies against CD5 (eBioscience, catalogue No. 45-0051) and mouse IgG2a (BDBiosciences, catalogue No. 553390) for the determination of the percentage of T cells in these two organs that were coated with the SMIP.

[0285] FIG. 10A shows that intravenous administration of H57Null2 SMIP did not cause loss of body weight. FIG. 10B shows that such treatment did not caused an increase in clinical score, either. These results demonstrate that this Null2 SMIP has the desired safety profile.

[0286] FIG. 11 shows that intravenous administration of H57Null2 SMIP did not induce cytokine storm in normal BALB/c mice, in contrast to the parental antibody. Two representative cytokines, IL-6 and IL-4 from the 14 analyte panel are shown.

[0287] FIG. 12 shows that H57Null2 SMIP coated T cells were detected in the spleen after intravenous administration of H57Null2 SMIP.

### Example 8

### Fusion Protein Inhibits Acute Graft Versus Host Disease In Vivo

[0288] To determine if surrogate molecules are efficacious in an acute graft versus host disease (aGVHD) mouse model, mice were treated with exemplary fusion proteins and then monitored for weight loss, donor:host lymphocyte ratio, and cytokine and chemokine production.

[0289] aGVHD was induced in female C57BL/6 xDBA2 F1 mice (Taconic) by transferring splenocytes from donor female C57BL/6 mice (Taconic). Spleens from donor mice were collected and submerged in cold RPMI containing 10% FBS. The collected spleens were dissociated using sterile, frosted glass slides. The supernatant was collected, spun down, and the cells washed as described previously. Washed splenocytes were then resuspended in sterile PBS at a concentration of 65×10⁶ per 200 μl. Immediately before injection, the splenocyte mixture was passed through a 100 μm cell strainer (BD Falcon) to remove debris and large clumps of cells. 200 μl of the donor splenocyte cell suspension was injected intravenously (IV) through the lateral tail vein of the F1 recipient mice. For IV injections via the lateral tail vein, mice were exposed briefly to a heat lamp and confined in a plastic mouse restrainer. Injections were administered using a 27.5 gauge needle. Recipient mice had pronounced disease by day 14 after donor cell transfer, and at this time point the experiment was terminated and evaluated. Disease progression was associated with body weight loss and the expansion of donor cells with concomitant loss, due to donor cell-mediated attack, of host cells in the spleen of transferred animals. Serum biomarkers such as IFNγ have also been correlated with disease progression.

[0290] For efficacy studies, donor cells were transferred into F1 recipients on Day 0 (D0) of the study as described above. The SMIP, IgG2a control and PBS treatments were administered on D0, D1, D3, D5, D7, D9, and D11 with the experiment being harvested on D14. All treatment injections were administered IV except for the D0 injection which was given via the retro-orbital sinus prior to the donor cell transfer. 100 μg of H57Null2 SMIP or IgG2a in a 100 μl volume or 100 μl of PBS is given per injection. All proteins used in the in vivo studies had less than 0.5 EU/mg of endotoxin. Mice treated with the immunosuppressant dexamethasone (DEX; Sigma) received 10 mg/kg per day via intraperitoneal injection (IP).

[0291] During the course of the experiment, mice were weighed every other day until they started losing weight at which point they were weighed every day. The percentage of initial body weight lost by the recipient mice is depicted in FIG. 13. Administration of H57Null2 SMIP prevented body weight loss associated with aGVHD disease progression in contrast to mice which received the PBS or IgG2a control treatments.

[0292] Mice were bled on day 7 for serum biomarker analysis. On day 14, the terminal time point, spleens and blood samples were harvested from each animal. The weights and total cell counts of each spleen were determined. Sera samples were analyzed for the presence of cytokines and chemokines using a custom 14-plex Luminex-based detection kit from Millipore (Milliplex series), following the manufacturer's protocol. The 14 analytes detected by the kit were: G-CSF, GM-CSF, IL-2, IL-4, IL-5, IL-6, IL-10, IL-13, IL-17, IP-10, KC, MCP1, IFNγ, and TNFα. Cytokine and chemokine production was inhibited in mice treated with SMIP, including G-CSF (FIG. 14A), KC (FIG. 14B) and IFNγ (FIG. 14C). These results indicated that administration of SMIP inhibited the cytokine and chemokine production associated with aGVHD, especially the IFNγ production (which is typically highly elevated at day 7 in diseased aGVHD mice). On day 14, splenocytes were isolated as described previously and stained with antibodies against H-2b (donor cells) and H2-d (H2b+, H2-d+ cells were of host origin) for analysis using a LSRII flow cytometer (BD Biosciences). Mice that received H57Null2 fusion protein had a donor lymphocyte:host lymphocyte ratio similar to the mice that received DEX and negative control mice that received no donor cells (FIG. 15). These results indicate that fusion proteins of this disclosure inhibit the expansion of donor lymphocytes, which coincides with the decrease in host lymphocytes associated with aGVHD seen in the mice who received the PBS and IgG2a control treatments.

[0293] These in vivo studies indicate that fusion proteins of this disclosure inhibit the progression of aGVHD, as evidenced by a lack of donor lymphocyte expansion, inflammatory cytokine and chemokine production, and loss of body weight. Similar efficacy has also been found in preliminary results using a chronic GVHD mouse model.

[0294] Experimental models in aGVHD have also been completed to evaluate H57 half null, H57 null2, and 2C11 null2. H57 half null and H57 null2 were found to be efficacious with similar results in the parameters examined, despite early release of some cytokines in biomarker studies. The 2C11 null2 fusion protein was also efficacious and found to prevent donor cell expansion in the aGVHD model.

### Example 9

### Fusion Proteins with N297A and an Additional Single Alanine Substitution in IGG4 C_{H2} Region Block a T Cell Response to Alloantigen

[0295] Human MLR assays were performed as described in Example 2 using the following fusion proteins: OKT3 IgG4-WT-N297A (SEQ ID NO:232), OKT3 IgG4-ALGG-N297A (SEQ ID NO:234), OKT3 IgG4-FAGG-N297A (SEQ ID NO:236), OKT3 IgG4-FLAG-N297A (SEQ ID NO:238), OKT3 IgG4-FLGA-N297A (SEQ ID NO:240), OKT3 IgG4-AA-N297 (SEQ ID NO:91), OKT3 FL and OKT3 mAb.

[0296] FIG. 20 shows that the OKT3 IgG4 fusion proteins containing (a) only an alanine substitution at N297 or (b) both an alanine substitution at N297 and an additional alanine substitution at position F234, L235, G236 or F237 blocked a T cell response to alloantigen better than known OKT3 mAb and OKT3 ala-ala antibody.

### Example 10

### MLR Reaction can be Influenced by Choice of Hinge Regions

[0297] Human MLR assays were performed as described in Example 2 using fusion proteins derived from BC3 IgG1-N297A (SEQ ID NO:80) and containing hinges of various lengths and sequences: Linker 125 derived from UBA (SEQ ID NO:329), Linker 126 derived from an IgE C_{H2} (SEQ ID NO:330), Linker 127 derived from an IgD hinge (SEQ ID NO:331), Linker 128 derived from an IgA2 hinge (SEQ ID NO:332), and Linker 129 derived from an IgG1 hinge (SEQ ID NO:333). The amino acid sequences of the BC3 IgG2-N297A SMIPs containing the above-noted linkers are set forth in SEQ ID NOS:325, 323, 319, 315, and 311, respectively. The nucleotide sequences encoding these BC3 IgG2-N297A SMIPs are set forth in SEQ ID NOS:324, 322, 318, 314, and 310, respectively.

[0298] FIG. 21 shows the effect of different hinges on the capability of BC3 IgG1-N297A fusion proteins in blocking a T cell response to alloantigen. It appears that fusion proteins with shorter hinges were more effective in blocking the T cell response. However, in all cases, the single chain fusion proteins having the BC3 binding domain were more effective in blocking the T cell response to alloantigen than Hulg1 BC3 (an antibody molecule that contains the variable region of the BC3 mAb and human IgG1 constant region).

### Example 11

### In Vitro Analysis of Humanized Cris7 Fusion Proteins

[0299] Human MLR assays were performed as described in Example 2 were performed using various humanized Cris7 fusion proteins: humanized Cris7 (VH3-VL1) IgG1-N297A (SEQ ID NO:290), humanized Cris7 (VH3-VL2) IgG1-N297A (SEQ ID NO:295), humanized Cris7 (VH3-VL1) IgG2-AA-N297A (SEQ ID NO:292), humanized Cris7 (VH3-VL2) IgG2-AA-N297A (SEQ ID NO:297), humanized Cris7 (VH3-VL1) IgG4-AA-N297A (SEQ ID NO:293), humanized Cris7 (VH3-VL2) IgG4-AA-N297A (SEQ ID NO:298), chimeric Cris7 IgG1-N297A (SEQ ID NO:265), humanized Cris7 (VH3-VL1) HM1 (SEQ ID NO:294), humanized Cris7 (VH3-VL2) HM1 (SEQ ID NO:299), and chimeric Cris7 HM1 (SEQ ID NO:269).

[0300] FIG. 22 shows that humanized Cris7 IgG1-N297A, IgG2-AA-N297A and IgG4-AA-N297A fusion proteins and a chimeric Cris7 IgG1-N297A fusion protein blocked a T cell response to alloantigen better than known Cris7 mAb.

[0301] FIG. 23 also shows that humanized Cris7 IgG1-N297A, IgG2-AA-N297A and IgG4-AA-N297A fusion proteins and a chimeric Cris7 IgG1-N297A fusion protein blocked a T cell response to alloantigen better than known Cris7 mAb. In addition, humanized and chimeric Cris7 HM1 fusion proteins also blocked a T cell response to alloantigen better than Cris7 mAb.

[0302] Mitogenicity and cytokine release of PHA-primed T cells re-stimulated by humanized Cris7 (VH3-VL1) IgG1-N297A and humanized Cris7 (VH3-VL2) IgG1-N297A fusion proteins were analyzed using the methods described in Example 1. The following cytokines were tested: IL-1b, IL-10, IL-17, IFNγ, TNFα, IL6, MCP-1, IP-10, IL-2 and IL4.

[0303] FIG. 24 shows that the humanized Cris7 (VH3-VL1) IgG1-N297A and humanized Cris7 (VH3-VL2) IgG1-N297A fusion proteins did not activate PHA-primer T cells. Similar data were generated with humanized Cris7 (VH3-VL1) IgG2-AA-N297A, humanized Cris7 (VH3-VL2) IgG2-AA-N297A, humanized Cris7 (VH3-VL1) IgG4-AA-N297A, and humanized Cris7 (VH3-VL2) IgG4-AA-N297A fusion proteins.

[0304] The cytokine release results show that (1) humanized Cris7 IgG1-N297A, humanized Cris7-IgG2-AA-N297A, humanized Cris7-IgG4-AA-N297A and chimeric Cris7 IgG1-N297A fusion proteins were not different from control non-T cell binding SMIP protein, (2) parent Cris7 mAb was comparable to the humanized Cris7 IgG1-N297A, humanized Cris7-IgG2-AA-N297A, and humanized Cris7-IgG4-AA-N297A fusion proteins except IL-17 (parent Cris7 mAb induced more IL-17 release than the humanized Cris7 fusion proteins), (3) Nuvion FL activated cells to produce IL-10, IFNγ, IL-17, TNFα, and IL-6, and (4) all molecules tested (including control non-T cell binding SMIP) caused secretion of MCP-1 at levels as high as PHA re-stimulation. The results of IFNγ and IL-17 release are shown in FIGS. 25A and 25B, respectively.

[0305] Cytokine levels in a primary mitogenicity assay in cynomolgous PBMC in vitro were measured as follows: non-human primate PBMCs from cynomolgus monkeys were isolated as described in Example 1 with the exceptions of using 90% of Lymphocyte Separation Media in PBS 1× (CMF) and preparing the density gradient in 15 ml conical tubes. Cells were resuspended at a concentration of 4×10⁶ cells/ml in RPMI complete media (RPMI-1640 containing 10% human AB serum, 100 U/mL penicillin, 100 μg/mL Streptomycin, and 2 mM L-glutamine) and aliquot to 96 well flat bottom plate at 100 ul/well along with indicated treatments. Cells were incubated at 37° C. Supernatants from each well were sampled on day 1, day 2 and day 3, and analyzed for presence of non human primate cytokines using a custom 9-plex Luminex based detection kit from Millipore, following the manufacture's protocol. The 9 analytes detected by the kit were: IL-1β, IL-2, IL-4, IL-6, IL-10, IL-17, MCP1, IFNγ, and TNFα.

[0306] The results (FIGS. 26A-H) show that the humanized Cris7 (VH3-VL1) IgG4-AA-N297A and humanized Cris7 (VH3-VL2) IgG4-AA-N297A fusion proteins induce less release of IFNγ, IL-17, IL-4, TNFα, IL-6 and IL-10 as compared to Cris7 mAb, whereas the levels of IL-1B and IL-2 were comparable after treatments with the humanized Cris7 IgG4-AA-N297A fusion proteins and after treatments with Cris7 mAb.

### Example 12

### Biomarker Study of Exemplary Fusion Proteins Containing H57Binding Domain

[0307] Ten-week old female C57BL/6×DBA2 F1 mice were weight matched and divided into five groups of eight animals per group. Animals were injected IV via the retro-orbital sinus (200 μL of the molar equivalent of 300 μg H57Null2 SMIP) with IgG2a isotype control, H57Null2 SMIP (SEQ ID NO:96), H57 ½ Null SMIP (SEQ ID NO:304), H57 HM2 SMIP (SEQ ID NO:306), or 5 μg of H57 mAb. Four mice from each group were euthanized at 24 hours and the remaining four mice per group were euthanized at the end of the experiment three days post-injection. Mice were monitored for clinical symptoms of drug-associated toxicities as previously described. All mice were bled at 2 hours post-injection and at their terminal timepoint. Sera samples were analyzed for the presence of cytokines and chemokines using a custom 14-plex Luminex-based detection kit from Millipore as previously described. In addition to blood collection for serum analysis, an aliquot of blood was collected into whole blood microtainer tubes (containing EDTA) for peripheral blood staining of white blood cells. Briefly, 5 μL of whole blood was added to wells in a 96-well U-bottom plate. 5 μL of Rat Anti-10 μg/ml mouse CD16/CD32 Fc Block (BD Pharmingen) was added and plates incubated at room temperature for 15 minutes, medium speed on a plate shaker. 10 μL of antibody cocktail (or appropriate single stain controls) against CD5 (PE-Cy5), CD19 (FITC, eBioscience,) and CD45 (PE, eBioscience,) were added for a final dilution of 1:4000. Plates were incubated for an additional 20 minutes at room temperature, light protected, set on a plate shaker at medium speed. 180 μL of 1×BD Pharm Lyse buffer was added and wells mixed thoroughly and allowed to sit at room temperature for 30 minutes. 50 μL of each sample were then analyzed on the BD LSRII High Throughput Sampler (HTS). The gating strategy was as follows: cells that fell within a FSC:SSC lymphocyte gate were analyzed for CD45 expression, cells that subsequently fell within the CD45+ gate were then analyzed for CD5 and CD19 expression. Cells per ml of each cell type were back calculated based on the 50 μL sample collected and dilution factor of 40.

[0308] FIG. 27 shows that intravenous administration of H57Null2, half null and HM2 SMIP proteins did not cause loss of body weight, while intravenous administration of H57 mAb caused loss of body weight. All mice appeared normal without obvious signs of distress between day 0 and day 3.

[0309] FIG. 28 shows that intravenous administration of H57Null2, H57 half Null, H57 HM2, or H57 mAb results in a transient decrease in circulating CD5+ T-cells (cells/ml) compared to IgG2a isotype control. Levels of circulating CD5+ T-cells (cells/ml) are not significantly different between groups at 72 hrs after injection (FIG. 29).

[0310] FIGS. 30A-38C show that (1) H57Null2 and H57 HM2 did not cause increase in cytokine production compared to IgG2a, and (2) H57 half null treatment elevated the levels of IL-2, IL-10, IP-10, TNFα, and IL-17 at 2 hours post injection, but the levels of all but IL-5 returned to normal levels by 24 hours post injection.

### Example 13

### Pharmacokinetic Study of Exemplary Fusion Proteins Containing H57Binding Domain

[0311] Female BALB/c mice were injected intravenously (IV) at time 0 with 200 μL of PBS containing 200 μg of H57Null2 (SEQ ID NO:96), H57-HM2 (SEQ ID NO:306) or H57 half null SMIP protein (SEQ ID NO:304). Three mice per group were injected for each time point: For H57-HM2 SMIP protein, serum samples were obtained at 15 min and 2, 6, 8, 24, 30, 48, 72, 168, and 336 hr, and for H57Null2 and H57 half null, additional time points were taken at 96 and 504 hr, but the 8 and 30 hr samples were omitted. Anesthetized mice were exsanguinated via the brachial plexus or cardiac puncture at the indicted time points after injection, and serum was collected as described below.

[0312] Serum concentrations of BC3 IgG4-AA-N297A and BC3 IgG2-AA-N297A were determined with a sandwich ELISA using a goat anti-human IgG Fc specific antibody as the capture reagent, and HRP conjugates of antibodies to human IgG4 or IgG2 to detect bound BC3 IgG4-AA-N297A or BC3-IgG2-AA-N297A SMIP, respectively. Serum concentrations for OKT3IgG4-AA-N297A and BC3-HM1 were determined in a FACS-based binding assay using the CD3⁺ Jurkat cell line. Jurkat cells were incubated in 96 well flat bottom plates along with serum samples from mice injected with OKT3 IgG4-AA-N297A or BC3-HM1. Each serum sample was tested in triplicate at one dilution. The dilutions used for samples varied for different time points, but ranged from 1:20 to 1:15,000 for OKT3 IgG4-AA-N297A and 1:20 to 1:1000 for BC3-HM1. (Pooled samples from mice injected with OKT3 IgG2-AA-N297A or BC3-HM1 were tested in a preliminary assay, so the appropriate dilution for each sample was known.) Cells were incubated for an hour in the presence of the diluted serum samples or standards (see below) and were washed before the addition of the detection reagent. Binding of OKT3 Ig-4-AA-N297A to Jurkat cells was detected using a PE-conjugated goat anti-human IgG Fcγ fragment-specific antibody, whereas binding of BC3-HM1 to Jurkat cells was detected using a PE-conjugated anti-His antibody. Serum concentrations for H57Null2, H57-HM2, and H57 half null were determined in a FACS-based binding assay using EL4 cells, a mouse T cell line. EL4 cells were blocked with anti-mouse CD16/CD32, and then incubated in 96-well flat bottom plates along with serum samples from mice injected with H57-null2. Each serum sample was tested in triplicate at one dilution. The dilutions used for samples varied for different time points, but ranged from 1:500 to 1:10,000. (Pooled samples from mice injected with H57-null2 were tested in a preliminary assay, so the appropriate dilution for each sample was known.) Standard curves consisted of various known concentrations of H57Null2 spiked into FACS buffer, run in triplicate. Serum was not added to standard curves because development work showed that serum at dilutions greater than 1:50 had no effect on standard curves, and much larger dilutions (minimum of 1:500) of serum were required for PK samples.

[0313] EL4 cells were incubated for an hour in the presence of the diluted serum samples or standards and were washed before the addition of the detection reagent. Binding of H57Null2 and H57 half null to EL4 cells was detected using a PE-conjugated donkey anti-mouse IgG (H+L) antibody, whereas binding of H57-HM2 to EL4 cells was detected using a PE-conjugated anti-His antibody. The samples were analyzed by flow cytometry. The mean fluorescence intensities (MFI) were imported into Softmax Pro software to calculate serum concentrations and to determine precision and accuracy of standard curves.

[0314] Serum samples were analyzed for the presence of cytokines and chemokines using a custom 14-plex Luminex-based detection kit from Millipore as previously described. Pharmacokinetic disposition parameters for each protein were estimated by non-compartmental analysis using WinNonlin™ Professional software (v5.0.1) and applying the precompiled model 201 for IV bolus administration and sparse sampling. The PK results are provided in FIG. 40 and the calculated half-lives are provided in Table 2 below, while the cytokine results are provided in FIGS. 40-49.

TABLE 2
PK Results

| Test Compound | Serum Half Life (hrs) |
|---|---|
| H57 Null2 (SEQ ID NO: 96) | 83.5 |
| H57 half null (SEQ ID NO: 304) | 40.7 |
| H57-HM2 (SEQ ID NO: 306) | 6.6 |
| BC3-HM1 (SEQ ID NO: 84) | 3.2 |
| BC3 IgG2-AA-N297A (SEQ ID NO: 82) | 87.5 |
| BC3IgG4-AA-N297A (SEQ ID NO: 83) | 99.7 |
| OKT3 IgG2-AA-N297A (SEQ ID NO: 90) | 42.4 |

[0315] The results of the PK study show the SMIP proteins that contain a CH2CH3 tail have a much longer half life than those that contain CH3 only tails.

[0316] FIGS. 39-48 show that the H57-HM2 SMIP protein generally did not cause elevated levels of most cytokines (IFN-γ, IL-2, IL-5, IL-6, or IL-17) at all the time points measured. This may be due in part to the shorter half life of this molecule. In addition, the few elevated levels of cytokine observed were generally periodic and always lower than the levels seen with the H57 half null SMIP fusion protein.

### Example 14

### In Vitro Studies of Exemplary Fusion Proteins Containing H57Binding Domain

[0317] MLR and ConA blast restimulation assays were performed according to the methods in Example 6.

[0318] The results show that H57Null2, H57 half null and H57-HM2 fusion proteins (SEQ ID NOS:96, 304 and 306, respectively), but not H57 mAb blocked primary T cell response to antigen (FIGS. 50 and 51). In addition, H57Null2, H57 half null and H57-HM2 fusion proteins and IgG2a did not induce activation of ConA-primed T cells, H57 mAb slightly induced activation of ConA-primed T cells, and 2C11 mAb induced activation of ConA-primed T cells (FIG. 52). H57 Null2 and H57-HM2 fusion proteins did not induce cytokine release in ConA blast restimulation assays, while H57 half null fusion protein resulted in higher levels of some cytokines tested (e.g., GM-CSF, IFN-γ, IL-4, IL-5, IL-6, IL-10, IL-17, IP-10 and TNF-α) compared to H57Null2 and H57-HM2 fusion proteins (data not shown).

[0319] The various embodiments described above can be combined to provide further embodiments. All of the U.S. patents, U.S. patent application publications, U.S. patent applications, foreign patents, foreign patent applications and non-patent publications referred to in this specification and/or listed in the Application Data Sheet are incorporated herein by reference, in their entirety.

[0320] These and other changes can be made to the embodiments in light of the above-detailed description. In general, in the following claims, the terms used should not be construed to limit the claims to specific embodiments disclosed in the specification and the claims, but should be construed to include all possible embodiments along with the full scope of equivalents to which such claims are entitled. Accordingly, the claims are not limited by this disclosure.

The application's sequence listing, which the Patent Office published only in electronic form, follows.

SEQUENCE LISTING (434 sequences)

SEQ ID NO: 1 - DNA, 357 bp, Artificial Sequence
  OKT3 VH nucleotide sequence
caggtccagctgcagcagtctggggctgaactggcaagacctggggcctcagtgaagatgtcctgcaaggcttctggctacacctttactaggtacacgatgcactgggtaaaacagaggcctggacagggtctggaatggattggatacattaatcctagccgtggttatactaattacaatcagaagttcaaggacaaggccacattgactacagacaaatcctccagcacagcctacatgcaactgagcagcctgacatctgaggactctgcagtctattactgtgcaagatattatgatgatcattactgccttgactactggggccaaggcaccacggtcaccgtctcaagc

SEQ ID NO: 2 - protein, 119 aa, Artificial Sequence
  OKT3 VH amino acid sequence
QVQLQQSGAELARPGASVKMSCKASGYTFTRYTMHWVKQRPGQGLEWIGYINPSRGYTNYNQKFKDKATLTTDKSSSTAYMQLSSLTSEDSAVYYCARYYDDHYCLDYWGQGTTVTVSS

SEQ ID NO: 3 - DNA, 318 bp, Artificial Sequence
  OKT3 VL nucleotide sequence
caaattgttctcacccagtctccagcaatcatgtctgcatctccaggggagaaggtcaccatgacctgcagtgccagctcaagtgtaagttacatgaactggtaccagcagaagtcaggcacctcccccaaaagatggatttatgacacatccaaactggcttctggagtccctgctcacttcaggggcagtgggtctgggacctcttactctctcacaatcagcggcatggaggctgaagatgctgccacttattactgccagcagtggagtagtaacccattcacgttcggctcggggacaaagttggaaataaac

SEQ ID NO: 4 - protein, 106 aa, Artificial Sequence [sequence omitted]

SEQ ID NO: 5 - DNA, 369 bp, Artificial Sequence
  BC3 VH nucleotide sequence
caggtccagctgcagcagtctgcagctgaactggcaagacctggggcctcagtgaagatgtcctgcaaggcttctggctacacctttactaggtacacgatgcagtgggtaaaacagaggcctggacagggtctggaatggattggatacattaatcctagtagtggatatattgggtacagtcagaagttcaaggacaagaccacattgactgcagacaaatcctccagcacagcctacatgcaactgagcagtctgacatctgaggactctgcggtctattactgtgcaagatcgaaggtctactatgattacgacgtttattctatggactactggggtcaaggaacctcggtcaccgtctcaagc

SEQ ID NO: 6 - protein, 123 aa, Artificial Sequence
  BC3 VH amino acid sequence
QVQLQQSAAELARPGASVKMSCKASGYTFTRYTMQWVKQRPGQGLEWIGYINPSSGYIGYSQKFKDKTTLTADKSSSTAYMQLSSLTSEDSAVYYCARSKVYYDYDVYSMDYWGQGTSVTVSS

SEQ ID NO: 7 - DNA, 318 bp, Artificial Sequence
  BC3 VL nucleotide sequence
caaattattctcacccagtctccagcaatcatgtctgcatctccaggggagaaggtcaccatgacctgcagtgccagctcaagtgtaagttacatgcactggtaccagcagaagtcaggcacctcccccaaaagatggatttatgacacatccaaactggcctctggcgtccctgctcgcttcagtggcagtgggtctgggacctcttactctctcacaatcagcagcatggaggctgaagatgctgccacttattactgccagcagtggagtagtaatccactcacgttcggtgctgggaccaagctggagctgaaa

SEQ ID NO: 8 - protein, 106 aa, Artificial Sequence
  BC3 VL amino acid sequence
QIILTQSPAIMSASPGEKVTMTCSASSSVSYMHWYQQKSGTSPKRWIYDTSKLASGVPARFSGSGSGTSYSLTISSMEAEDAATYYCQQWSSNPLTFGAGTKLELK

SEQ ID NO: 9 - protein, 22 aa, Artificial Sequence
  Modified human 2H7 Leader (for BC3, OKT3, 2C11 and H57)
MDFQVQIFSFLLISASVIMSRG

SEQ ID NO: 10 - protein, 17 aa, Artificial Sequence
  Modified huIgG1-SCCP hinge ; Linker 87
  SITE (1)...(2): junction amino acids
RTEPKSSDKTHTCPPCP

SEQ ID NO: 11 - protein, 217 aa, Artificial Sequence
  G1 N297A  CH2-CH3 (N297ST - A297ST)
APELLGGPSVFLFPPKPKDTLMISRTPEVTCVVVDVSHEDPEVKFNWYVDGVEVHNAKTKPREEQYASTYRVVSVLTVLHQDWLNGKEYKCKVSNKALPAPIEKTISKAKGQPREPQVYTLPPSRDELTKNQVSLTCLVKGFYPSDIAVEWESNGQPENNYKTTPPVLDSDGSFFLYSKLTVDKSRWQQGNVFSCSVMHEALHNHYTQKSLSLSPGK

SEQ ID NO: 12 - protein, 216 aa, Artificial Sequence
  IgG1 AA N297A CH2CH3 (Ala substitutions at 234, 235, 237 and 297; 236 deleted)
APEAAAPSVFLFPPKPKDTLMISRTPEVTCVVVDVSHEDPEVKFNWYVDGVEVHNAKTKPREEQYASTYRVVSVLTVLHQDWLNGKEYKCKVSNKALPAPIEKTISKAKGQPREPQVYTLPPSRDELTKNQVSLTCLVKGFYPSDIAVEWESNGQPENNYKTTPPVLDSDGSFFLYSKLTVDKSRWQQGNVFSCSVMHEALHNHYTQKSLSLSPGK

SEQ ID NO: 13 - protein, 216 aa, Artificial Sequence
  G2 AA N297A CH2CH3 (Ala substitution at 234, 236 and 297)
APEAAAPSVFLFPPKPKDTLMISRTPEVTCVVVDVSHEDPEVQFNWYVDGMEVHNAKTKPREEQFASTFRVVSVLTVVHQDWLNGKEYKCKVSNKGLPAPIEKTISKTKGQPREPQVYTLPPSREEMTKNQVSLTCLVKGFYPSDIAVEWESNGQPENNYKTTPPMLDSDGSFFLYSKLTVDKSRWQQGNVFSCSVMHEALHNHYTQKSLSLSPGK

SEQ ID NO: 14 - protein, 216 aa, Artificial Sequence
  G4 AA N297A CH2CH3 (Ala substitutions at 234, 235, 237 and 297; 236 deleted)
APEAAAPSVFLFPPKPKDTLMISRTPEVTCVVVDVSQEDPEVQFNWYVDGVEVHNAKTKPREEQFASTYRVVSVLTVLHQDWLNGKEYKCKVSNKGLPSSIEKTISKAKGQPREPQVYTLPPSQEEMTKNQVSLTCLVKGFYPSDIAVEWESNGQPENNYKTTPPVLDSDGSFFLYSRLTVDKSRWQEGNVFSCSVMHEALHNHYTQKSLSLSPGK

SEQ ID NO: 15 - protein, 259 aa, Artificial Sequence
  HM1 (IgM-CH3::IgG1-CH3) with C-terminal tail
DQDTAIRVFAIPPSFASIFLTKSTKLTCLVTDLTTYDSVTISWTRQNGEAVKTHTNISESHPNATFSAVGEASICEDDWNSGERFTCTVTHTDLPSPLKQTISRPKGQPREPQVYTLPPSRDELTKNQVSLTCLVKGFYPSDIAVEWESNGQPENNYKTTPPVLDSDGSFFLYSKLTVDKSRWQQGNVFSCSVMHEALHNHYTQKSLSLSPGKTGLNDIFEAQKIEWHEDYKDDDDKDYKDDDDKDYKDDDDKHHHHHH

SEQ ID NO: 16 - protein, 153 aa, Artificial Sequence
  DeltaCH2 (g1CH3 only)
GQPREPQVYTLPPSRDELTKNQVSLTCLVKGFYPSDIAVEWESNGQPENNYKTTPPVLDSDGSFFLYSKLTVDKSRWQQGNVFSCSVMHEALHNHYTQKSLSLSPGKTGLNDIFEAQKIEWHEDYKDDDDKDYKDDDDKDYKDDDDKHHHHHH

SEQ ID NO: 17 - DNA, 738 bp, Artificial Sequence
  BC3-VH-VL Nucleotide (includes g4s linker)
caggtccagctgcagcagtctgcagctgaactggcaagacctggggcctcagtgaagatgtcctgcaaggcttctggctacacctttactaggtacacgatgcagtgggtaaaacagaggcctggacagggtctggaatggattggatacattaatcctagtagtggatatattgggtacagtcagaagttcaaggacaagaccacattgactgcagacaaatcctccagcacagcctacatgcaactgagcagtctgacatctgaggactctgcggtctattactgtgcaagatcgaaggtctactatgattacgacgtttattctatggactactggggtcaaggaacctcggtcaccgtctcaagcggtggcggagggtctgggggtggcggatccggaggtggtggctctgcacaacaaattattctcacccagtctccagcaatcatgtctgcatctccaggggagaaggtcaccatgacctgcagtgccagctcaagtgtaagttacatgcactggtaccagcagaagtcaggcacctcccccaaaagatggatttatgacacatccaaactggtctctggcgtccctgctcgcttcagtggcagtgggtctgggacctcttactctctcacaatcagcagcatggaggctgaagatgctgccacttattactgccagcagtggagtagtaatccactcacgttcggtgctgggaccaagctggagctgaaa

SEQ ID NO: 18 - protein, 246 aa, Artificial Sequence
  BC3-VH-VL amino acid sequence (includes g4s linker)
QVQLQQSAAELARPGASVKMSCKASGYTFTRYTMQWVKQRPGQGLEWIGYINPSSGYIGYSQKFKDKTTLTADKSSSTAYMQLSSLTSEDSAVYYCARSKVYYDYDVYSMDYWGQGTSVTVSSGGGGSGGGGSGGGGSAQQIILTQSPAIMSASPGEKVTMTCSASSSVSYMHWYQQKSGTSPKRWIYDTSKLASGVPARFSGSGSGTSYSLTISSMEAEDAATYYCQQWSSNPLTFGAGTKLELK

SEQ ID NO: 19 - DNA, 726 bp, Artificial Sequence
  OKT3-VH-VL Nucleotide (includes g4s linker)
caggtccagctgcagcagtctggggctgaactggcaagacctggggcctcagtgaagatgtcctgcaaggcttctggctacacctttactaggtacacgatgcactgggtaaaacagaggcctggacagggtctggaatggattggatacattaatcctagccgtggttatactaattacaatcagaagttcaaggacaaggccacattgactacagacaaatcctccagcacagcctacatgcaactgagcagcctgacatctgaggactctgcagtctattactgtgcaagatattatgatgatcattactgccttgactactggggccaaggcaccacggtcaccgtctcaagcggtggcggagggtctgggggtggcggatccggaggtggtggctctgcacaacaaattgttctcacccagtctccagcaatcatgtctgcatctccaggggagaaggtcaccatgacctgcagtgccagctcaagtgtaagttacatgaactggtaccagcagaagtcaggcacctcccccaaaagatggatttatgacacatccaaactggcttctggagtccctgctcacttcaggggcagtgggtctgggacctcttactctctcacaatcagcggcatggaggctgaagatgctgccacttattactgccagcagtggagtagtaacccattcacgttcggctcggggacaaagttggaaataaac

SEQ ID NO: 20 - protein, 242 aa, Artificial Sequence
  OKT3-VH-VL amino acid sequence (includes g4s linker)
QVQLQQSGAELARPGASVKMSCKASGYTFTRYTMHWVKQRPGQGLEWIGYINPSRGYTNYNQKFKDKATLTTDKSSSTAYMQLSSLTSEDSAVYYCARYYDDHYCLDYWGQGTTVTVSSGGGGSGGGGSGGGGSAQQIVLTQSPAIMSASPGEKVTMTCSASSSVSYMNWYQQKSGTSPKRWIYDTSKLASGVPAHFRGSGSGTSYSLTISGMEAEDAATYYCQQWSSNPFTFGSGTKLEIN

SEQ ID NO: 21 - DNA, 1509 bp, Artificial Sequence
  BC3-G1 N297A Nucleotide- human 2H7 leader through CH3
atggattttcaagtgcagattttcagcttcctgctaatcagtgcttcagtcataatgtcgcgaggacaggtccagctgcagcagtctgcagctgaactggcaagacctggggcctcagtgaagatgtcctgcaaggcttctggctacacctttactaggtacacgatgcagtgggtaaaacagaggcctggacagggtctggaatggattggatacattaatcctagtagtggatatattgggtacagtcagaagttcaaggacaagaccacattgactgcagacaaatcctccagcacagcctacatgcaactgagcagtctgacatctgaggactctgcggtctattactgtgcaagatcgaaggtctactatgattacgacgtttattctatggactactggggtcaaggaacctcggtcaccgtctcaagcggtggcggagggtctgggggtggcggatccggaggtggtggctctgcacaacaaattattctcacccagtctccagcaatcatgtctgcatctccaggggagaaggtcaccatgacctgcagtgccagctcaagtgtaagttacatgcactggtaccagcagaagtcaggcacctcccccaaaagatggatttatgacacatccaaactggtctctggcgtccctgctcgcttcagtggcagtgggtctgggacctcttactctctcacaatcagcagcatggaggctgaagatgctgccacttattactgccagcagtggagtagtaatccactcacgttcggtgctgggaccaagctggagctgaaacgaactgagcccaaatcttctgacaaaactcacacatgcccaccgtgcccagcacctgaactcctgggtggaccgtcagtcttcctcttccccccaaaacccaaggacaccctcatgatctcccggacccctgaggtcacatgcgtggtggtggacgtgagccacgaagaccctgaggtcaagttcaactggtacgtggacggcgtggaggtgcataatgccaagacaaagccgcgggaggagcagtacgccagcacgtaccgtgtggtcagcgtcctcaccgtcctgcaccaggactggctgaatggcaaggagtacaagtgcaaggtctccaacaaagccctcccagcccccatcgagaaaaccatctccaaagccaaagggcagccccgagaaccacaggtgtacaccctgcccccatcccgggatgagctgaccaagaaccaggtcagcctgacctgcctggtcaaaggcttctatccaagcgacatcgccgtggagtgggagagcaatgggcagccggagaacaactacaagaccacgcctcccgtgctggactccgacggctccttcttcctctacagcaagctcaccgtggacaagagcaggtggcagcaggggaacgtcttctcatgctccgtgatgcatgaggctctgcacaaccactacacgcagaagagcctctccctgtctccgggtaaatga

SEQ ID NO: 22 - protein, 502 aa, Artificial Sequence
  BC3-g1 N297A amino acid sequence- 2H7L leader through CH3
MDFQVQIFSFLLISASVIMSRGQVQLQQSAAELARPGASVKMSCKASGYTFTRYTMQWVKQRPGQGLEWIGYINPSSGYIGYSQKFKDKTTLTADKSSSTAYMQLSSLTSEDSAVYYCARSKVYYDYDVYSMDYWGQGTSVTVSSGGGGSGGGGSGGGGSAQQIILTQSPAIMSASPGEKVTMTCSASSSVSYMHWYQQKSGTSPKRWIYDTSKLASGVPARFSGSGSGTSYSLTISSMEAEDAATYYCQQWSSNPLTFGAGTKLELKRTEPKSSDKTHTCPPCPAPELLGGPSVFLFPPKPKDTLMISRTPEVTCVVVDVSHEDPEVKFNWYVDGVEVHNAKTKPREEQYASTYRVVSVLTVLHQDWLNGKEYKCKVSNKALPAPIEKTISKAKGQPREPQVYTLPPSRDELTKNQVSLTCLVKGFYPSDIAVEWESNGQPENNYKTTPPVLDSDGSFFLYSKLTVDKSRWQQGNVFSCSVMHEALHNHYTQKSLSLSPGK

SEQ ID NO: 23 - DNA, 1506 bp, Artificial Sequence
  BC3-g1 AA N297A Nucleotide - human 2H7 leader through CH3
atggattttcaagtgcagattttcagcttcctgctaatcagtgcttcagtcataatgtcgcgaggacaggtccagctgcagcagtctgcagctgaactggcaagacctggggcctcagtgaagatgtcctgcaaggcttctggctacacctttactaggtacacgatgcagtgggtaaaacagaggcctggacagggtctggaatggattggatacattaatcctagtagtggatatattgggtacagtcagaagttcaaggacaagaccacattgactgcagacaaatcctccagcacagcctacatgcaactgagcagtctgacatctgaggactctgcggtctattactgtgcaagatcgaaggtctactatgattacgacgtttattctatggactactggggtcaaggaacctcggtcaccgtctcaagcggtggcggagggtctgggggtggcggatccggaggtggtggctctgcacaacaaattattctcacccagtctccagcaatcatgtctgcatctccaggggagaaggtcaccatgacctgcagtgccagctcaagtgtaagttacatgcactggtaccagcagaagtcaggcacctcccccaaaagatggatttatgacacatccaaactggtctctggcgtccctgctcgcttcagtggcagtgggtctgggacctcttactctctcacaatcagcagcatggaggctgaagatgctgccacttattactgccagcagtggagtagtaatccactcacgttcggtgctgggaccaagctggagctgaaacgaactgagcccaaatcttctgacaaaactcacacatgcccaccgtgcccagcacctgaagccgcagctccgtcagtcttcctcttccccccaaaacccaaggacaccctcatgatctcccggacccctgaggtcacatgcgtggtggtggacgtgagccacgaagaccctgaggtcaagttcaactggtacgtggacggcgtggaggtgcataatgccaagacaaagccgcgggaggagcagtacgccagcacgtaccgtgtggtcagcgtcctcaccgtcctgcaccaggactggctgaatggcaaggagtacaagtgcaaggtctccaacaaagccctcccagcccccatcgagaaaaccatctccaaagccaaagggcagccccgagaaccacaggtgtacaccctgcccccatcccgggatgagctgaccaagaaccaggtcagcctgacctgcctggtcaaaggcttctatccaagcgacatcgccgtggagtgggagagcaatgggcagccggagaacaactacaagaccacgcctcccgtgctggactccgacggctccttcttcctctacagcaagctcaccgtggacaagagcaggtggcagcaggggaacgtcttctcatgctccgtgatgcatgaggctctgcacaaccactacacgcagaagagcctctccctgtctccgggtaaatga

SEQ ID NO: 24 - protein, 501 aa, Artificial Sequence
  BC3-g1 AA N297A - human 2H7 leader through CH3
MDFQVQIFSFLLISASVIMSRGQVQLQQSAAELARPGASVKMSCKASGYTFTRYTMQWVKQRPGQGLEWIGYINPSSGYIGYSQKFKDKTTLTADKSSSTAYMQLSSLTSEDSAVYYCARSKVYYDYDVYSMDYWGQGTSVTVSSGGGGSGGGGSGGGGSAQQIILTQSPAIMSASPGEKVTMTCSASSSVSYMHWYQQKSGTSPKRWIYDTSKLASGVPARFSGSGSGTSYSLTISSMEAEDAATYYCQQWSSNPLTFGAGTKLELKRTEPKSSDKTHTCPPCPAPEAAAPSVFLFPPKPKDTLMISRTPEVTCVVVDVSHEDPEVKFNWYVDGVEVHNAKTKPREEQYASTYRVVSVLTVLHQDWLNGKEYKCKVSNKALPAPIEKTISKAKGQPREPQVYTLPPSRDELTKNQVSLTCLVKGFYPSDIAVEWESNGQPENNYKTTPPVLDSDGSFFLYSKLTVDKSRWQQGNVFSCSVMHEALHNHYTQKSLSLSPGK

SEQ ID NO: 25 - DNA, 1506 bp, Artificial Sequence
  BC3-g2 AA N297A Nucleotide - human 2H7 leader through CH3
atggattttcaagtgcagattttcagcttcctgctaatcagtgcttcagtcataatgtcgcgaggacaggtccagctgcagcagtctgcagctgaactggcaagacctggggcctcagtgaagatgtcctgcaaggcttctggctacacctttactaggtacacgatgcagtgggtaaaacagaggcctggacagggtctggaatggattggatacattaatcctagtagtggatatattgggtacagtcagaagttcaaggacaagaccacattgactgcagacaaatcctccagcacagcctacatgcaactgagcagtctgacatctgaggactctgcggtctattactgtgcaagatcgaaggtctactatgattacgacgtttattctatggactactggggtcaaggaacctcggtcaccgtctcaagcggtggcggagggtctgggggtggcggatccggaggtggtggctctgcacaacaaattattctcacccagtctccagcaatcatgtctgcatctccaggggagaaggtcaccatgacctgcagtgccagctcaagtgtaagttacatgcactggtaccagcagaagtcaggcacctcccccaaaagatggatttatgacacatccaaactggtctctggcgtccctgctcgcttcagtggcagtgggtctgggacctcttactctctcacaatcagcagcatggaggctgaagatgctgccacttattactgccagcagtggagtagtaatccactcacgttcggtgctgggaccaagctggagctgaaacgaactgagcccaaatcttctgacaaaactcacacatgcccaccgtgcccagcacctgaagccgcagctccgtcagtcttcctcttccccccaaaacccaaggacaccctcatgatctcccggacccctgaggtcacgtgcgtggtggtggacgtgagccacgaagaccccgaggtccagttcaactggtacgtggacggcatggaggtgcataatgccaagacaaagccacgggaggagcagttcgccagcacgttccgtgtggtcagcgtcctcaccgtcgtgcaccaggactggctgaacggcaaggagtacaagtgcaaggtctccaacaaaggcctcccagcccccatcgagaaaaccatctccaaaaccaaagggcagccccgagaaccacaggtgtacaccctgcccccatcccgggaggagatgaccaagaaccaggtcagcctgacctgcctggtcaaaggcttctaccccagcgacatcgccgtggagtgggagagcaatgggcagccggagaacaactacaagaccacacctcccatgctggactccgacggctccttcttcctctacagcaagctcaccgtggacaagagcaggtggcagcaggggaacgtcttctcatgctccgtgatgcatgaggctctgcacaaccactacacacagaagagcctctccctgtctccgggtaaatga

SEQ ID NO: 26 - protein, 501 aa, Artificial Sequence
  BC3-g2 AA N297A - human 2H7 leader through CH3
MDFQVQIFSFLLISASVIMSRGQVQLQQSAAELARPGASVKMSCKASGYTFTRYTMQWVKQRPGQGLEWIGYINPSSGYIGYSQKFKDKTTLTADKSSSTAYMQLSSLTSEDSAVYYCARSKVYYDYDVYSMDYWGQGTSVTVSSGGGGSGGGGSGGGGSAQQIILTQSPAIMSASPGEKVTMTCSASSSVSYMHWYQQKSGTSPKRWIYDTSKLASGVPARFSGSGSGTSYSLTISSMEAEDAATYYCQQWSSNPLTFGAGTKLELKRTEPKSSDKTHTCPPCPAPEAAAPSVFLFPPKPKDTLMISRTPEVTCVVVDVSHEDPEVQFNWYVDGMEVHNAKTKPREEQFASTFRVVSVLTVVHQDWLNGKEYKCKVSNKGLPAPIEKTISKTKGQPREPQVYTLPPSREEMTKNQVSLTCLVKGFYPSDIAVEWESNGQPENNYKTTPPMLDSDGSFFLYSKLTVDKSRWQQGNVFSCSVMHEALHNHYTQKSLSLSPGK

SEQ ID NO: 27 - DNA, 1506 bp, Artificial Sequence
  BC3-g4 AA N297A Nucleotide - human 2H7 leader through CH3
atggattttcaagtgcagattttcagcttcctgctaatcagtgcttcagtcataatgtcgcgaggacaggtccagctgcagcagtctgcagctgaactggcaagacctggggcctcagtgaagatgtcctgcaaggcttctggctacacctttactaggtacacgatgcagtgggtaaaacagaggcctggacagggtctggaatggattggatacattaatcctagtagtggatatattgggtacagtcagaagttcaaggacaagaccacattgactgcagacaaatcctccagcacagcctacatgcaactgagcagtctgacatctgaggactctgcggtctattactgtgcaagatcgaaggtctactatgattacgacgtttattctatggactactggggtcaaggaacctcggtcaccgtctcaagcggtggcggagggtctgggggtggcggatccggaggtggtggctctgcacaacaaattattctcacccagtctccagcaatcatgtctgcatctccaggggagaaggtcaccatgacctgcagtgccagctcaagtgtaagttacatgcactggtaccagcagaagtcaggcacctcccccaaaagatggatttatgacacatccaaactggtctctggcgtccctgctcgcttcagtggcagtgggtctgggacctcttactctctcacaatcagcagcatggaggctgaagatgctgccacttattactgccagcagtggagtagtaatccactcacgttcggtgctgggaccaagctggagctgaaacgaactgagcccaaatcttctgacaaaactcacacatgcccaccgtgcccagcacctgaagccgcagctccgtcagtcttcctcttccccccaaaacccaaggacaccctcatgatctcccggacccctgaggtcacgtgcgtggtggtggacgtgagccaggaagaccccgaggtccagttcaactggtacgtggatggcgtggaggtgcataatgccaagacaaagccgcgggaggagcagttcgccagcacgtaccgtgtggtcagcgtcctcaccgtcctgcaccaggactggctgaacggcaaggagtacaagtgcaaggtctccaacaaaggcctcccgtcctccatcgagaaaaccatctccaaagccaaagggcagccccgagagccacaggtgtacaccctgcccccatcccaggaggagatgaccaagaaccaggtcagcctgacctgcctggtcaaaggcttctaccccagcgacatcgccgtggagtgggagagcaatgggcagccggagaacaactacaagaccacgcctcccgtgctggactccgacggctccttcttcctctacagcaggctaaccgtggacaagagccggtggcaggaggggaatgtcttctcatgctccgtgatgcatgaggctctgcacaaccactacacacagaagagcctctccctgtctccgggtaaatga

SEQ ID NO: 28 - protein, 501 aa, Artificial Sequence
  BC3-g4 AA N297A - human 2H7 leader through CH3
MDFQVQIFSFLLISASVIMSRGQVQLQQSAAELARPGASVKMSCKASGYTFTRYTMQWVKQRPGQGLEWIGYINPSSGYIGYSQKFKDKTTLTADKSSSTAYMQLSSLTSEDSAVYYCARSKVYYDYDVYSMDYWGQGTSVTVSSGGGGSGGGGSGGGGSAQQIILTQSPAIMSASPGEKVTMTCSASSSVSYMHWYQQKSGTSPKRWIYDTSKLASGVPARFSGSGSGTSYSLTISSMEAEDAATYYCQQWSSNPLTFGAGTKLELKRTEPKSSDKTHTCPPCPAPEAAAPSVFLFPPKPKDTLMISRTPEVTCVVVDVSQEDPEVQFNWYVDGVEVHNAKTKPREEQFASTYRVVSVLTVLHQDWLNGKEYKCKVSNKGLPSSIEKTISKAKGQPREPQVYTLPPSQEEMTKNQVSLTCLVKGFYPSDIAVEWESNGQPENNYKTTPPVLDSDGSFFLYSRLTVDKSRWQEGNVFSCSVMHEALHNHYTQKSLSLSPGK

SEQ ID NO: 29 - DNA, 1635 bp, Artificial Sequence
  BC3-HM1 Nucleotide - human 2H7 leader through g1 CH3
atggattttcaagtgcagattttcagcttcctgctaatcagtgcttcagtcataatgtcgcgaggacaggtccagctgcagcagtctgcagctgaactggcaagacctggggcctcagtgaagatgtcctgcaaggcttctggctacacctttactaggtacacgatgcagtgggtaaaacagaggcctggacagggtctggaatggattggatacattaatcctagtagtggatatattgggtacagtcagaagttcaaggacaagaccacattgactgcagacaaatcctccagcacagcctacatgcaactgagcagtctgacatctgaggactctgcggtctattactgtgcaagatcgaaggtctactatgattacgacgtttattctatggactactggggtcaaggaacctcggtcaccgtctcaagcggtggcggagggtctgggggtggcggatccggaggtggtggctctgcacaacaaattattctcacccagtctccagcaatcatgtctgcatctccaggggagaaggtcaccatgacctgcagtgccagctcaagtgtaagttacatgcactggtaccagcagaagtcaggcacctcccccaaaagatggatttatgacacatccaaactggtctctggcgtccctgctcgcttcagtggcagtgggtctgggacctcttactctctcacaatcagcagcatggaggctgaagatgctgccacttattactgccagcagtggagtagtaatccactcacgttcggtgctgggaccaagctggagctgaaacgaactgagcccaaatcttgtgacaaaactcacacatgcccaccgtgcccagatcaagacacagccatccgggtcttcgccatccccccatcctttgccagcatcttcctcaccaagtccaccaagttgacctgcctggtcacagacctgaccacctatgacagcgtgaccatctcctggacccgccagaatggcgaagctgtgaaaacccacaccaacatctccgagagccaccccaatgccactttcagcgccgtgggtgaggccagcatctgcgaggatgactggaattccggggagaggttcacgtgcaccgtgacccacacagacctgccctcgccactgaagcagaccatctcccggcccaaggggcagccccgagaaccacaggtgtacaccctgcccccatcccgggatgagctgaccaagaaccaggtcagcctgacctgcctggtcaaaggcttctatcccagcgacatcgccgtggagtgggagagcaatgggcagccggagaacaactacaagaccacgcctcccgtgctggactccgacggctccttcttcctctatagcaagctcaccgtggacaagagcaggtggcagcaggggaacgtcttctcatgctccgtgatgcatgaggctctgcacaaccactacacgcagaagagcctctccctgtccccgggtaaaaccggtctgaacgacatcttcgaggctcagaaaatcgaatggcacgaagattacaaggatgacgacgataaggattacaaggatgacgacgataaggattacaaggatgacgacgataagcatcatcatcatcatcactga

SEQ ID NO: 30 - protein, 544 aa, Artificial Sequence
  BC3-HM1 - human 2H7 leader through g1 CH3
MDFQVQIFSFLLISASVIMSRGQVQLQQSAAELARPGASVKMSCKASGYTFTRYTMQWVKQRPGQGLEWIGYINPSSGYIGYSQKFKDKTTLTADKSSSTAYMQLSSLTSEDSAVYYCARSKVYYDYDVYSMDYWGQGTSVTVSSGGGGSGGGGSGGGGSAQQIILTQSPAIMSASPGEKVTMTCSASSSVSYMHWYQQKSGTSPKRWIYDTSKLASGVPARFSGSGSGTSYSLTISSMEAEDAATYYCQQWSSNPLTFGAGTKLELKRTEPKSCDKTHTCPPCPDQDTAIRVFAIPPSFASIFLTKSTKLTCLVTDLTTYDSVTISWTRQNGEAVKTHTNISESHPNATFSAVGEASICEDDWNSGERFTCTVTHTDLPSPLKQTISRPKGQPREPQVYTLPPSRDELTKNQVSLTCLVKGFYPSDIAVEWESNGQPENNYKTTPPVLDSDGSFFLYSKLTVDKSRWQQGNVFSCSVMHEALHNHYTQKSLSLSPGKTGLNDIFEAQKIEWHEDYKDDDDKDYKDDDDKDYKDDDDKHHHHHH

SEQ ID NO: 31 - DNA, 1317 bp, Artificial Sequence
  BC3-delta CH2 Nucleotide - human 2H7 leader through g1 CH3
atggattttcaagtgcagattttcagcttcctgctaatcagtgcttcagtcataatgtcgcgaggacaggtccagctgcagcagtctgcagctgaactggcaagacctggggcctcagtgaagatgtcctgcaaggcttctggctacacctttactaggtacacgatgcagtgggtaaaacagaggcctggacagggtctggaatggattggatacattaatcctagtagtggatatattgggtacagtcagaagttcaaggacaagaccacattgactgcagacaaatcctccagcacagcctacatgcaactgagcagtctgacatctgaggactctgcggtctattactgtgcaagatcgaaggtctactatgattacgacgtttattctatggactactggggtcaaggaacctcggtcaccgtctcaagcggtggcggagggtctgggggtggcggatccggaggtggtggctctgcacaacaaattattctcacccagtctccagcaatcatgtctgcatctccaggggagaaggtcaccatgacctgcagtgccagctcaagtgtaagttacatgcactggtaccagcagaagtcaggcacctcccccaaaagatggatttatgacacatccaaactggtctctggcgtccctgctcgcttcagtggcagtgggtctgggacctcttactctctcacaatcagcagcatggaggctgaagatgctgccacttattactgccagcagtggagtagtaatccactcacgttcggtgctgggaccaagctggagctgaaacgaactgagcccaaatcttgtgacaaaactcacacatgcccaccgtgcccagggcagccccgagaaccacaggtgtacaccctgcccccatcccgggatgagctgaccaagaaccaggtcagcctgacctgcctggtcaaaggcttctatcccagcgacatcgccgtggagtgggagagcaatgggcagccggagaacaactacaagaccacgcctcccgtgctggactccgacggctccttcttcctctatagcaagctcaccgtggacaagagcaggtggcagcaggggaacgtcttctcatgctccgtgatgcatgaggctctgcacaaccactacacgcagaagagcctctccctgtccccgggtaaaaccggtctgaacgacatcttcgaggctcagaaaatcgaatggcacgaagattacaaggatgacgacgataaggattacaaggatgacgacgataaggattacaaggatgacgacgataagcatcatcatcatcatcactga

SEQ ID NO: 32 - protein, 438 aa, Artificial Sequence
  BC3-delta CH2 - human 2H7 leader through g1 CH3
MDFQVQIFSFLLISASVIMSRGQVQLQQSAAELARPGASVKMSCKASGYTFTRYTMQWVKQRPGQGLEWIGYINPSSGYIGYSQKFKDKTTLTADKSSSTAYMQLSSLTSEDSAVYYCARSKVYYDYDVYSMDYWGQGTSVTVSSGGGGSGGGGSGGGGSAQQIILTQSPAIMSASPGEKVTMTCSASSSVSYMHWYQQKSGTSPKRWIYDTSKLASGVPARFSGSGSGTSYSLTISSMEAEDAATYYCQQWSSNPLTFGAGTKLELKRTEPKSCDKTHTCPPCPGQPREPQVYTLPPSRDELTKNQVSLTCLVKGFYPSDIAVEWESNGQPENNYKTTPPVLDSDGSFFLYSKLTVDKSRWQQGNVFSCSVMHEALHNHYTQKSLSLSPGKTGLNDIFEAQKIEWHEDYKDDDDKDYKDDDDKDYKDDDDKHHHHHH

SEQ ID NO: 33 - DNA, 1497 bp, Artificial Sequence
  OKT3-G1 N297A Nucleotide - human 2H7 leader through CH3
atggattttcaagtgcagattttcagcttcctgctaatcagtgcttcagtcataatgtcgcgaggacaggtccagctgcagcagtctggggctgaactggcaagacctggggcctcagtgaagatgtcctgcaaggcttctggctacacctttactaggtacacgatgcactgggtaaaacagaggcctggacagggtctggaatggattggatacattaatcctagccgtggttatactaattacaatcagaagttcaaggacaaggccacattgactacagacaaatcctccagcacagcctacatgcaactgagcagcctgacatctgaggactctgcagtctattactgtgcaagatattatgatgatcattactgccttgactactggggccaaggcaccacggtcaccgtctcaagcggtggcggagggtctgggggtggcggatccggaggtggtggctctgcacaacaaattgttctcacccagtctccagcaatcatgtctgcatctccaggggagaaggtcaccatgacctgcagtgccagctcaagtgtaagttacatgaactggtaccagcagaagtcaggcacctcccccaaaagatggatttatgacacatccaaactggcttctggagtccctgctcacttcaggggcagtgggtctgggacctcttactctctcacaatcagcggcatggaggctgaagatgctgccacttattactgccagcagtggagtagtaacccattcacgttcggctcggggacaaagttggaaataaaccgaactgagcccaaatcttctgacaaaactcacacatgcccaccgtgcccagcacctgaactcctgggtggaccgtcagtcttcctcttccccccaaaacccaaggacaccctcatgatctcccggacccctgaggtcacatgcgtggtggtggacgtgagccacgaagaccctgaggtcaagttcaactggtacgtggacggcgtggaggtgcataatgccaagacaaagccgcgggaggagcagtacgccagcacgtaccgtgtggtcagcgtcctcaccgtcctgcaccaggactggctgaatggcaaggagtacaagtgcaaggtctccaacaaagccctcccagcccccatcgagaaaaccatctccaaagccaaagggcagccccgagaaccacaggtgtacaccctgcccccatcccgggatgagctgaccaagaaccaggtcagcctgacctgcctggtcaaaggcttctatccaagcgacatcgccgtggagtgggagagcaatgggcagccggagaacaactacaagaccacgcctcccgtgctggactccgacggctccttcttcctctacagcaagctcaccgtggacaagagcaggtggcagcaggggaacgtcttctcatgctccgtgatgcatgaggctctgcacaaccactacacgcagaagagcctctccctgtctccgggtaaatga

SEQ ID NO: 34 - protein, 498 aa, Artificial Sequence
  OKT3-G1 N297A - human 2H7 leader through CH3
MDFQVQIFSFLLISASVIMSRGQVQLQQSGAELARPGASVKMSCKASGYTFTRYTMHWVKQRPGQGLEWIGYINPSRGYTNYNQKFKDKATLTTDKSSSTAYMQLSSLTSEDSAVYYCARYYDDHYCLDYWGQGTTVTVSSGGGGSGGGGSGGGGSAQQIVLTQSPAIMSASPGEKVTMTCSASSSVSYMNWYQQKSGTSPKRWIYDTSKLASGVPAHFRGSGSGTSYSLTISGMEAEDAATYYCQQWSSNPFTFGSGTKLEINRTEPKSSDKTHTCPPCPAPELLGGPSVFLFPPKPKDTLMISRTPEVTCVVVDVSHEDPEVKFNWYVDGVEVHNAKTKPREEQYASTYRVVSVLTVLHQDWLNGKEYKCKVSNKALPAPIEKTISKAKGQPREPQVYTLPPSRDELTKNQVSLTCLVKGFYPSDIAVEWESNGQPENNYKTTPPVLDSDGSFFLYSKLTVDKSRWQQGNVFSCSVMHEALHNHYTQKSLSLSPGK

SEQ ID NO: 35 - DNA, 1494 bp, Artificial Sequence
  OKT3-G1 AA N297A Nucleotide - human 2H7 leader through CH3
atggattttcaagtgcagattttcagcttcctgctaatcagtgcttcagtcataatgtcgcgaggacaggtccagctgcagcagtctggggctgaactggcaagacctggggcctcagtgaagatgtcctgcaaggcttctggctacacctttactaggtacacgatgcactgggtaaaacagaggcctggacagggtctggaatggattggatacattaatcctagccgtggttatactaattacaatcagaagttcaaggacaaggccacattgactacagacaaatcctccagcacagcctacatgcaactgagcagcctgacatctgaggactctgcagtctattactgtgcaagatattatgatgatcattactgccttgactactggggccaaggcaccacggtcaccgtctcaagcggtggcggagggtctgggggtggcggatccggaggtggtggctctgcacaacaaattgttctcacccagtctccagcaatcatgtctgcatctccaggggagaaggtcaccatgacctgcagtgccagctcaagtgtaagttacatgaactggtaccagcagaagtcaggcacctcccccaaaagatggatttatgacacatccaaactggcttctggagtccctgctcacttcaggggcagtgggtctgggacctcttactctctcacaatcagcggcatggaggctgaagatgctgccacttattactgccagcagtggagtagtaacccattcacgttcggctcggggacaaagttggaaataaaccgaactgagcccaaatcttctgacaaaactcacacatgcccaccgtgcccagcacctgaagccgcagctccgtcagtcttcctcttccccccaaaacccaaggacaccctcatgatctcccggacccctgaggtcacatgcgtggtggtggacgtgagccacgaagaccctgaggtcaagttcaactggtacgtggacggcgtggaggtgcataatgccaagacaaagccgcgggaggagcagtacgccagcacgtaccgtgtggtcagcgtcctcaccgtcctgcaccaggactggctgaatggcaaggagtacaagtgcaaggtctccaacaaagccctcccagcccccatcgagaaaaccatctccaaagccaaagggcagccccgagaaccacaggtgtacaccctgcccccatcccgggatgagctgaccaagaaccaggtcagcctgacctgcctggtcaaaggcttctatccaagcgacatcgccgtggagtgggagagcaatgggcagccggagaacaactacaagaccacgcctcccgtgctggactccgacggctccttcttcctctacagcaagctcaccgtggacaagagcaggtggcagcaggggaacgtcttctcatgctccgtgatgcatgaggctctgcacaaccactacacgcagaagagcctctccctgtctccgggtaaatga

SEQ ID NO: 36 - protein, 497 aa, Artificial Sequence
  OKT3-G1 AA N297A - human 2H7 leader through CH3
MDFQVQIFSFLLISASVIMSRGQVQLQQSGAELARPGASVKMSCKASGYTFTRYTMHWVKQRPGQGLEWIGYINPSRGYTNYNQKFKDKATLTTDKSSSTAYMQLSSLTSEDSAVYYCARYYDDHYCLDYWGQGTTVTVSSGGGGSGGGGSGGGGSAQQIVLTQSPAIMSASPGEKVTMTCSASSSVSYMNWYQQKSGTSPKRWIYDTSKLASGVPAHFRGSGSGTSYSLTISGMEAEDAATYYCQQWSSNPFTFGSGTKLEINRTEPKSSDKTHTCPPCPAPEAAAPSVFLFPPKPKDTLMISRTPEVTCVVVDVSHEDPEVKFNWYVDGVEVHNAKTKPREEQYASTYRVVSVLTVLHQDWLNGKEYKCKVSNKALPAPIEKTISKAKGQPREPQVYTLPPSRDELTKNQVSLTCLVKGFYPSDIAVEWESNGQPENNYKTTPPVLDSDGSFFLYSKLTVDKSRWQQGNVFSCSVMHEALHNHYTQKSLSLSPGK

SEQ ID NO: 37 - DNA, 1494 bp, Artificial Sequence
  OKT3-G2 AA N297A Nucleotide - human 2H7 leader through CH3
atggattttcaagtgcagattttcagcttcctgctaatcagtgcttcagtcataatgtcgcgaggacaggtccagctgcagcagtctggggctgaactggcaagacctggggcctcagtgaagatgtcctgcaaggcttctggctacacctttactaggtacacgatgcactgggtaaaacagaggcctggacagggtctggaatggattggatacattaatcctagccgtggttatactaattacaatcagaagttcaaggacaaggccacattgactacagacaaatcctccagcacagcctacatgcaactgagcagcctgacatctgaggactctgcagtctattactgtgcaagatattatgatgatcattactgccttgactactggggccaaggcaccacggtcaccgtctcaagcggtggcggagggtctgggggtggcggatccggaggtggtggctctgcacaacaaattgttctcacccagtctccagcaatcatgtctgcatctccaggggagaaggtcaccatgacctgcagtgccagctcaagtgtaagttacatgaactggtaccagcagaagtcaggcacctcccccaaaagatggatttatgacacatccaaactggcttctggagtccctgctcacttcaggggcagtgggtctgggacctcttactctctcacaatcagcggcatggaggctgaagatgctgccacttattactgccagcagtggagtagtaacccattcacgttcggctcggggacaaagttggaaataaaccgaactgagcccaaatcttctgacaaaactcacacatgcccaccgtgcccagcacctgaagccgcagctccgtcagtcttcctcttccccccaaaacccaaggacaccctcatgatctcccggacccctgaggtcacgtgcgtggtggtggacgtgagccacgaagaccccgaggtccagttcaactggtacgtggacggcatggaggtgcataatgccaagacaaagccacgggaggagcagttcgccagcacgttccgtgtggtcagcgtcctcaccgtcgtgcaccaggactggctgaacggcaaggagtacaagtgcaaggtctccaacaaaggcctcccagcccccatcgagaaaaccatctccaaaaccaaagggcagccccgagaaccacaggtgtacaccctgcccccatcccgggaggagatgaccaagaaccaggtcagcctgacctgcctggtcaaaggcttctaccccagcgacatcgccgtggagtgggagagcaatgggcagccggagaacaactacaagaccacacctcccatgctggactccgacggctccttcttcctctacagcaagctcaccgtggacaagagcaggtggcagcaggggaacgtcttctcatgctccgtgatgcatgaggctctgcacaaccactacacacagaagagcctctccctgtctccgggtaaatga

SEQ ID NO: 38 - protein, 497 aa, Artificial Sequence
  OKT3-G2 AA N297A - human 2H7 leader through CH3
MDFQVQIFSFLLISASVIMSRGQVQLQQSGAELARPGASVKMSCKASGYTFTRYTMHWVKQRPGQGLEWIGYINPSRGYTNYNQKFKDKATLTTDKSSSTAYMQLSSLTSEDSAVYYCARYYDDHYCLDYWGQGTTVTVSSGGGGSGGGGSGGGGSAQQIVLTQSPAIMSASPGEKVTMTCSASSSVSYMNWYQQKSGTSPKRWIYDTSKLASGVPAHFRGSGSGTSYSLTISGMEAEDAATYYCQQWSSNPFTFGSGTKLEINRTEPKSSDKTHTCPPCPAPEAAAPSVFLFPPKPKDTLMISRTPEVTCVVVDVSHEDPEVQFNWYVDGMEVHNAKTKPREEQFASTFRVVSVLTVVHQDWLNGKEYKCKVSNKGLPAPIEKTISKTKGQPREPQVYTLPPSREEMTKNQVSLTCLVKGFYPSDIAVEWESNGQPENNYKTTPPMLDSDGSFFLYSKLTVDKSRWQQGNVFSCSVMHEALHNHYTQKSLSLSPGK

SEQ ID NO: 39 - DNA, 1494 bp, Artificial Sequence
  OKT3-G4 AA N297A Nucleotide - human 2H7 leader through CH3
atggattttcaagtgcagattttcagcttcctgctaatcagtgcttcagtcataatgtcgcgaggacaggtccagctgcagcagtctggggctgaactggcaagacctggggcctcagtgaagatgtcctgcaaggcttctggctacacctttactaggtacacgatgcactgggtaaaacagaggcctggacagggtctggaatggattggatacattaatcctagccgtggttatactaattacaatcagaagttcaaggacaaggccacattgactacagacaaatcctccagcacagcctacatgcaactgagcagcctgacatctgaggactctgcagtctattactgtgcaagatattatgatgatcattactgccttgactactggggccaaggcaccacggtcaccgtctcaagcggtggcggagggtctgggggtggcggatccggaggtggtggctctgcacaacaaattgttctcacccagtctccagcaatcatgtctgcatctccaggggagaaggtcaccatgacctgcagtgccagctcaagtgtaagttacatgaactggtaccagcagaagtcaggcacctcccccaaaagatggatttatgacacatccaaactggcttctggagtccctgctcacttcaggggcagtgggtctgggacctcttactctctcacaatcagcggcatggaggctgaagatgctgccacttattactgccagcagtggagtagtaacccattcacgttcggctcggggacaaagttggaaataaaccgaactgagcccaaatcttctgacaaaactcacacatgcccaccgtgcccagcacctgaagccgcagctccgtcagtcttcctcttccccccaaaacccaaggacaccctcatgatctcccggacccctgaggtcacgtgcgtggtggtggacgtgagccaggaagaccccgaggtccagttcaactggtacgtggatggcgtggaggtgcataatgccaagacaaagccgcgggaggagcagttcgccagcacgtaccgtgtggtcagcgtcctcaccgtcctgcaccaggactggctgaacggcaaggagtacaagtgcaaggtctccaacaaaggcctcccgtcctccatcgagaaaaccatctccaaagccaaagggcagccccgagagccacaggtgtacaccctgcccccatcccaggaggagatgaccaagaaccaggtcagcctgacctgcctggtcaaaggcttctaccccagcgacatcgccgtggagtgggagagcaatgggcagccggagaacaactacaagaccacgcctcccgtgctggactccgacggctccttcttcctctacagcaggctaaccgtggacaagagccggtggcaggaggggaatgtcttctcatgctccgtgatgcatgaggctctgcacaaccactacacacagaagagcctctccctgtctccgggtaaatga

SEQ ID NO: 40 - protein, 497 aa, Artificial Sequence
  OKT3-G4 AA N297A - human 2H7 leader through CH3
MDFQVQIFSFLLISASVIMSRGQVQLQQSGAELARPGASVKMSCKASGYTFTRYTMHWVKQRPGQGLEWIGYINPSRGYTNYNQKFKDKATLTTDKSSSTAYMQLSSLTSEDSAVYYCARYYDDHYCLDYWGQGTTVTVSSGGGGSGGGGSGGGGSAQQIVLTQSPAIMSASPGEKVTMTCSASSSVSYMNWYQQKSGTSPKRWIYDTSKLASGVPAHFRGSGSGTSYSLTISGMEAEDAATYYCQQWSSNPFTFGSGTKLEINRTEPKSSDKTHTCPPCPAPEAAAPSVFLFPPKPKDTLMISRTPEVTCVVVDVSQEDPEVQFNWYVDGVEVHNAKTKPREEQFASTYRVVSVLTVLHQDWLNGKEYKCKVSNKGLPSSIEKTISKAKGQPREPQVYTLPPSQEEMTKNQVSLTCLVKGFYPSDIAVEWESNGQPENNYKTTPPVLDSDGSFFLYSRLTVDKSRWQEGNVFSCSVMHEALHNHYTQKSLSLSPGK

SEQ ID NO: 41 - DNA, 1623 bp, Artificial Sequence
  OKT3-HM1 Nucleotide - human 2H7 leader through G1 CH3
atggattttcaagtgcagattttcagcttcctgctaatcagtgcttcagtcataatgtcgcgaggacaggtccagctgcagcagtctggggctgaactggcaagacctggggcctcagtgaagatgtcctgcaaggcttctggctacacctttactaggtacacgatgcactgggtaaaacagaggcctggacagggtctggaatggattggatacattaatcctagccgtggttatactaattacaatcagaagttcaaggacaaggccacattgactacagacaaatcctccagcacagcctacatgcaactgagcagcctgacatctgaggactctgcagtctattactgtgcaagatattatgatgatcattactgccttgactactggggccaaggcaccacggtcaccgtctcaagcggtggcggagggtctgggggtggcggatccggaggtggtggctctgcacaacaaattgttctcacccagtctccagcaatcatgtctgcatctccaggggagaaggtcaccatgacctgcagtgccagctcaagtgtaagttacatgaactggtaccagcagaagtcaggcacctcccccaaaagatggatttatgacacatccaaactggcttctggagtccctgctcacttcaggggcagtgggtctgggacctcttactctctcacaatcagcggcatggaggctgaagatgctgccacttattactgccagcagtggagtagtaacccattcacgttcggctcggggacaaagttggaaataaaccgaactgagcccaaatcttgtgacaaaactcacacatgcccaccgtgcccagatcaagacacagccatccgggtcttcgccatccccccatcctttgccagcatcttcctcaccaagtccaccaagttgacctgcctggtcacagacctgaccacctatgacagcgtgaccatctcctggacccgccagaatggcgaagctgtgaaaacccacaccaacatctccgagagccaccccaatgccactttcagcgccgtgggtgaggccagcatctgcgaggatgactggaattccggggagaggttcacgtgcaccgtgacccacacagacctgccctcgccactgaagcagaccatctcccggcccaaggggcagccccgagaaccacaggtgtacaccctgcccccatcccgggatgagctgaccaagaaccaggtcagcctgacctgcctggtcaaaggcttctatcccagcgacatcgccgtggagtgggagagcaatgggcagccggagaacaactacaagaccacgcctcccgtgctggactccgacggctccttcttcctctatagcaagctcaccgtggacaagagcaggtggcagcaggggaacgtcttctcatgctccgtgatgcatgaggctctgcacaaccactacacgcagaagagcctctccctgtccccgggtaaaaccggtctgaacgacatcttcgaggctcagaaaatcgaatggcacgaagattacaaggatgacgacgataaggattacaaggatgacgacgataaggattacaaggatgacgacgataagcatcatcatcatcatcactga

SEQ ID NO: 42 - protein, 540 aa, Artificial Sequence
  OKT3-HM1 - human 2H7 leader through g1 CH3
MDFQVQIFSFLLISASVIMSRGQVQLQQSGAELARPGASVKMSCKASGYTFTRYTMHWVKQRPGQGLEWIGYINPSRGYTNYNQKFKDKATLTTDKSSSTAYMQLSSLTSEDSAVYYCARYYDDHYCLDYWGQGTTVTVSSGGGGSGGGGSGGGGSAQQIVLTQSPAIMSASPGEKVTMTCSASSSVSYMNWYQQKSGTSPKRWIYDTSKLASGVPAHFRGSGSGTSYSLTISGMEAEDAATYYCQQWSSNPFTFGSGTKLEINRTEPKSCDKTHTCPPCPDQDTAIRVFAIPPSFASIFLTKSTKLTCLVTDLTTYDSVTISWTRQNGEAVKTHTNISESHPNATFSAVGEASICEDDWNSGERFTCTVTHTDLPSPLKQTISRPKGQPREPQVYTLPPSRDELTKNQVSLTCLVKGFYPSDIAVEWESNGQPENNYKTTPPVLDSDGSFFLYSKLTVDKSRWQQGNVFSCSVMHEALHNHYTQKSLSLSPGKTGLNDIFEAQKIEWHEDYKDDDDKDYKDDDDKDYKDDDDKHHHHHH

SEQ ID NO: 43 - DNA, 1305 bp, Artificial Sequence
  OKT3 delta CH2 Nucleotide - human 2H7 leader through g1 CH3
atggattttcaagtgcagattttcagcttcctgctaatcagtgcttcagtcataatgtcgcgaggacaggtccagctgcagcagtctggggctgaactggcaagacctggggcctcagtgaagatgtcctgcaaggcttctggctacacctttactaggtacacgatgcactgggtaaaacagaggcctggacagggtctggaatggattggatacattaatcctagccgtggttatactaattacaatcagaagttcaaggacaaggccacattgactacagacaaatcctccagcacagcctacatgcaactgagcagcctgacatctgaggactctgcagtctattactgtgcaagatattatgatgatcattactgccttgactactggggccaaggcaccacggtcaccgtctcaagcggtggcggagggtctgggggtggcggatccggaggtggtggctctgcacaacaaattgttctcacccagtctccagcaatcatgtctgcatctccaggggagaaggtcaccatgacctgcagtgccagctcaagtgtaagttacatgaactggtaccagcagaagtcaggcacctcccccaaaagatggatttatgacacatccaaactggcttctggagtccctgctcacttcaggggcagtgggtctgggacctcttactctctcacaatcagcggcatggaggctgaagatgctgccacttattactgccagcagtggagtagtaacccattcacgttcggctcggggacaaagttggaaataaaccgaactgagcccaaatcttgtgacaaaactcacacatgcccaccgtgcccagggcagccccgagaaccacaggtgtacaccctgcccccatcccgggatgagctgaccaagaaccaggtcagcctgacctgcctggtcaaaggcttctatcccagcgacatcgccgtggagtgggagagcaatgggcagccggagaacaactacaagaccacgcctcccgtgctggactccgacggctccttcttcctctatagcaagctcaccgtggacaagagcaggtggcagcaggggaacgtcttctcatgctccgtgatgcatgaggctctgcacaaccactacacgcagaagagcctctccctgtccccgggtaaaaccggtctgaacgacatcttcgaggctcagaaaatcgaatggcacgaagattacaaggatgacgacgataaggattacaaggatgacgacgataaggattacaaggatgacgacgataagcatcatcatcatcatcactga

SEQ ID NO: 44 - protein, 434 aa, Artificial Sequence
  OKT3 delta CH2 - human 2H7 leader through g1 CH3
MDFQVQIFSFLLISASVIMSRGQVQLQQSGAELARPGASVKMSCKASGYTFTRYTMHWVKQRPGQGLEWIGYINPSRGYTNYNQKFKDKATLTTDKSSSTAYMQLSSLTSEDSAVYYCARYYDDHYCLDYWGQGTTVTVSSGGGGSGGGGSGGGGSAQQIVLTQSPAIMSASPGEKVTMTCSASSSVSYMNWYQQKSGTSPKRWIYDTSKLASGVPAHFRGSGSGTSYSLTISGMEAEDAATYYCQQWSSNPFTFGSGTKLEINRTEPKSCDKTHTCPPCPGQPREPQVYTLPPSRDELTKNQVSLTCLVKGFYPSDIAVEWESNGQPENNYKTTPPVLDSDGSFFLYSKLTVDKSRWQQGNVFSCSVMHEALHNHYTQKSLSLSPGKTGLNDIFEAQKIEWHEDYKDDDDKDYKDDDDKDYKDDDDKHHHHHH

SEQ ID NO: 45 - protein, 266 aa, Artificial Sequence
  H57 Leader-VH-Linker-VL
MDFQVQIFSFLLISASVIMSRGEVYLVESGGDLVQPGSSLKVSCAASGFTFSDFWMYWVRQAPGKGLEWVGRIKNKPNNYATEYADSVRGRFTISRDDSRNSIYLQMNRLRVDDTAIYYCTRAGRFDHFDYWGQGTMVTVSSGGGGSGGGGSGGGGSAQYELIQPSSASVTVGETVKITCSGDQLPKNFAYWFQQKSDKNILLLIYMDNKRPSGIPERFSGSTSGTTATLTISGAQPEDEAAYYCLSSYGDNNDLVFGSGTQLTVL

SEQ ID NO: 46 - DNA, 1521 bp, Artificial Sequence
  H57 Null2 Nucleotide - human 2H7 leader through muG2a CH3
atggattttcaagtgcagattttcagcttcctgctaatcagtgcttcagtcataatgtcgcgaggagaagtttacctggtggagtcagggggagatttagtgcagcctggaagttccctgaaagtctcctgtgcagcctctggattcaccttcagtgacttctggatgtactgggtccgccaggctccagggaaggggctggagtgggttggtagaattaaaaacaaacctaataattatgcaacagaatatgcggattccgtgagaggcagattcaccatctcaagagacgactcaagaaacagcatctatctgcaaatgaataggttaagagtcgatgacacagccatttattactgtactagagccgggaggttcgaccacttcgattactggggccaaggaaccatggtcaccgtctcaagcggtggcggagggtctgggggtggcggatccggaggtggtggctctgcacaatatgagctgatccaaccatcttcagcatcagtcactgtaggagagacggtcaaaatcacttgctctggggaccagttgccaaaaaattttgcttattggtttcagcaaaagtcagacaagaacattttactactcatatacatggataataagcgaccatcagggatcccagaacgattctctgggtccacttcaggtacaacagccaccttgaccatcagtggagcccagcctgaggatgaggctgcctattactgtttgtcttcatatggtgataataacgatttagtttttggcagcggaacccagctcaccgtcctacgaactgagcccagagtgcccataacacagaacccctgtcctccactcaaagagtgtcccccatgcgcagctccagacgcagcgggtgcgccatccgtcttcatcttccctccaaagatcaaggatgtactcatgatctccctgagccccatggtcacatgtgtggtggtggatgtgagcgaggatgacccagacgtccagatcagctggtttgtgaacaacgtggaagtacacacagctcagacacaaacccatagagaggattacaacagtactctccgggtggtcagtgccctccccatccagcaccaggactggatgagtggcaaggcgttcgcatgcgcggtcaacaacagagccctcccatcccccatcgagaaaaccatctcaaaacccagagggccagtaagagctccacaggtatatgtcttgcctccaccagcagaagagatgactaagaaagagttcagtctgacctgcatgatcacaggcttcttacctgccgaaattgctgtggactggaccagcaatgggcgtacagagcaaaactacaagaacaccgcaacagtcctggactctgatggttcttacttcatgtacagcaagctcagagtacaaaagagcacttgggaaagaggaagtcttttcgcctgctcagtggtccacgagggtctgcacaatcaccttacgactaagaccatctcccggtctctgggtaaatga

SEQ ID NO: 47 - protein, 506 aa, Artificial Sequence
  H57 Null2 SMIP - human 2H7 leader through mouse g2a CH3
MDFQVQIFSFLLISASVIMSRGEVYLVESGGDLVQPGSSLKVSCAASGFTFSDFWMYWVRQAPGKGLEWVGRIKNKPNNYATEYADSVRGRFTISRDDSRNSIYLQMNRLRVDDTAIYYCTRAGRFDHFDYWGQGTMVTVSSGGGGSGGGGSGGGGSAQYELIQPSSASVTVGETVKITCSGDQLPKNFAYWFQQKSDKNILLLIYMDNKRPSGIPERFSGSTSGTTATLTISGAQPEDEAAYYCLSSYGDNNDLVFGSGTQLTVLRTEPRVPITQNPCPPLKECPPCAAPDAAGAPSVFIFPPKIKDVLMISLSPMVTCVVVDVSEDDPDVQISWFVNNVEVHTAQTQTHREDYNSTLRVVSALPIQHQDWMSGKAFACAVNNRALPSPIEKTISKPRGPVRAPQVYVLPPPAEEMTKKEFSLTCMITGFLPAEIAVDWTSNGRTEQNYKNTATVLDSDGSYFMYSKLRVQKSTWERGSLFACSVVHEGLHNHLTTKTISRSLGK

SEQ ID NO: 48 - protein, 244 aa, Artificial Sequence
  H57 VH-Linker-VL (without leader)
EVYLVESGGDLVQPGSSLKVSCAASGFTFSDFWMYWVRQAPGKGLEWVGRIKNKPNNYATEYADSVRGRFTISRDDSRNSIYLQMNRLRVDDTAIYYCTRAGRFDHFDYWGQGTMVTVSSGGGGSGGGGSGGGGSAQYELIQPSSASVTVGETVKITCSGDQLPKNFAYWFQQKSDKNILLLIYMDNKRPSGIPERFSGSTSGTTATLTISGAQPEDEAAYYCLSSYGDNNDLVFGSGTQLTVL

SEQ ID NO: 49 - protein, 120 aa, Artificial Sequence
  H57 Null2 SMIP - VH amino acid
EVYLVESGGDLVQPGSSLKVSCAASGFTFSDFWMYWVRQAPGKGLEWVGRIKNKPNNYATEYADSVRGRFTISRDDSRNSIYLQMNRLRVDDTAIYYCTRAGRFDHFDYWGQGTMVTVSS

SEQ ID NO: 50 - protein, 110 aa, Artificial Sequence
  Mouse IGHG2c mutated CH2 (alanine substitutions at positions L234, L235, G237, E318, K320 and K322)
APDAAGAPSVFIFPPKIKDVLMISLSPMVTCVVVDVSEDDPDVQISWFVNNVEVHTAQTQTHREDYNSTLRVVSALPIQHQDWMSGKAFACAVNNRALPSPIEKTISKPR

SEQ ID NO: 51 - protein, 107 aa, Artificial Sequence
  H57 Null2 SMIP - VL amino acid sequence
YELIQPSSASVTVGETVKITCSGDQLPKNFAYWFQQKSDKNILLLIYMDNKRPSGIPERFSGSTSGTTATLTISGAQPEDEAAYYCLSSYGDNNDLVFGSGTQLTVL

SEQ ID NO: 52 - protein, 23 aa, Artificial Sequence
  H57 Null2 SMIP - Spacer and Hinge (RT is part of design); Linker 112
RTEPRVPITQNPCPPLKECPPCA

SEQ ID NO: 53 - protein, 110 aa, Artificial Sequence; identical to SEQ ID NO: 50
  H57 Null2 SMIP - CH2 amino acid (same as 2C11 CH2 domain; is a mutated mouse IGHG2c (an allele of IgG2a isotype) CH2 domain

SEQ ID NO: 54 - protein, 107 aa, Artificial Sequence
  H57 Null2 CH3 region
GPVRAPQVYVLPPPAEEMTKKEFSLTCMITGFLPAEIAVDWTSNGRTEQNYKNTATVLDSDGSYFMYSKLRVQKSTWERGSLFACSVVHEGLHNHLTTKTISRSLGK

SEQ ID NO: 55 - DNA, 1509 bp, Artificial Sequence
  2C11 Null2 SMIP nucleotide sequence
atggattttcaagtgcagattttcagcttcctgctaatcagtgcttcagtcataatgtcgcgaggagaggtgcagctggtggagtctgggggaggcttggtgcagcctggaaagtccctgaaactctcctgtgaggcctctggattcaccttcagcggctatggcatgcactgggtccgccaggctccagggagggggctggagtcggtcgcatacattactagtagtagtattaatatcaaatatgctgacgctgtgaaaggccggttcaccgtctccagagacaatgccaagaacttactgtttctacaaatgaacattctcaagtctgaggacacagccatgtactactgtgcaagattcgactgggacaaaaattactggggccaaggaaccatggtcaccgtctcaagcggtggcggagggtctgggggtggcggatccggaggtggtggctctgcacaagacatccagatgacccagtctccatcatcactgcctgcctccctgggagacagagtcactatcaattgtcaggccagtcaggacattagcaattatttaaactggtaccagcagaaaccagggaaagctcctaagctcctgatctattatacaaataaattggcagatggagtcccatcaaggttcagtggcagtggttctgggagagattcttctttcactatcagcagcctggaatccgaagatattggatcttattactgtcaacagtattataactatccgtggacgttcggacctggcaccaagctggaaatcaaacgaactgagcccagagtgcccataacacagaacccctgtcctccactcaaagagtgtcccccatgcgcagctccagacgcagcgggtgcgccatccgtcttcatcttccctccaaagatcaaggatgtactcatgatctccctgagccccatggtcacatgtgtggtggtggatgtgagcgaggatgacccagacgtccagatcagctggtttgtgaacaacgtggaagtacacacagctcagacacaaacccatagagaggattacaacagtactctccgggtggtcagtgccctccccatccagcaccaggactggatgagtggcaaggcgttcgcatgcgcggtcaacaacagagccctcccatcccccatcgagaaaaccatctcaaaacccagagggccagtaagagctccacaggtatatgtcttgcctccaccagcagaagagatgactaagaaagagttcagtctgacctgcatgatcacaggcttcttacctgccgaaattgctgtggactggaccagcaatgggcgtacagagcaaaactacaagaacaccgcaacagtcctggactctgatggttcttacttcatgtacagcaagctcagagtacaaaagagcacttgggaaagaggaagtcttttcgcctgctcagtggtccacgagggtctgcacaatcaccttacgactaagaccatctcccggtctctgggtaaatga

SEQ ID NO: 56 - protein, 502 aa, Artificial Sequence
  2C11 Null2 SMIP -human 2H7 leader through mouse g2a CH3
MDFQVQIFSFLLISASVIMSRGEVQLVESGGGLVQPGKSLKLSCEASGFTFSGYGMHWVRQAPGRGLESVAYITSSSINIKYADAVKGRFTVSRDNAKNLLFLQMNILKSEDTAMYYCARFDWDKNYWGQGTMVTVSSGGGGSGGGGSGGGGSAQDIQMTQSPSSLPASLGDRVTINCQASQDISNYLNWYQQKPGKAPKLLIYYTNKLADGVPSRFSGSGSGRDSSFTISSLESEDIGSYYCQQYYNYPWTFGPGTKLEIKRTEPRVPITQNPCPPLKECPPCAAPDAAGAPSVFIFPPKIKDVLMISLSPMVTCVVVDVSEDDPDVQISWFVNNVEVHTAQTQTHREDYNSTLRVVSALPIQHQDWMSGKAFACAVNNRALPSPIEKTISKPRGPVRAPQVYVLPPPAEEMTKKEFSLTCMITGFLPAEIAVDWTSNGRTEQNYKNTATVLDSDGSYFMYSKLRVQKSTWERGSLFACSVVHEGLHNHLTTKTISRSLGK

SEQ ID NO: 57 - skipped

SEQ ID NO: 58 - protein, 116 aa, Artificial Sequence
  2C11 Null2 SMIP - VH amino acid
EVQLVESGGGLVQPGKSLKLSCEASGFTFSGYGMHWVRQAPGRGLESVAYITSSSINIKYADAVKGRFTVSRDNAKNLLFLQMNILKSEDTAMYYCARFDWDKNYWGQGTMVTVSS

SEQ ID NO: 59 - protein, 480 aa, Artificial Sequence
  2C11 Null2 SMIP without leader
EVQLVESGGGLVQPGKSLKLSCEASGFTFSGYGMHWVRQAPGRGLESVAYITSSSINIKYADAVKGRFTVSRDNAKNLLFLQMNILKSEDTAMYYCARFDWDKNYWGQGTMVTVSSGGGGSGGGGSGGGGSAQDIQMTQSPSSLPASLGDRVTINCQASQDISNYLNWYQQKPGKAPKLLIYYTNKLADGVPSRFSGSGSGRDSSFTISSLESEDIGSYYCQQYYNYPWTFGPGTKLEIKRTEPRVPITQNPCPPLKECPPCAAPDAAGAPSVFIFPPKIKDVLMISLSPMVTCVVVDVSEDDPDVQISWFVNNVEVHTAQTQTHREDYNSTLRVVSALPIQHQDWMSGKAFACAVNNRALPSPIEKTISKPRGPVRAPQVYVLPPPAEEMTKKEFSLTCMITGFLPAEIAVDWTSNGRTEQNYKNTATVLDSDGSYFMYSKLRVQKSTWERGSLFACSVVHEGLHNHLTTKTISRSLGK

SEQ ID NO: 60 - protein, 107 aa, Artificial Sequence
  2C11 Null2 SMIP - VL amino acid
DIQMTQSPSSLPASLGDRVTINCQASQDISNYLNWYQQKPGKAPKLLIYYTNKLADGVPSRFSGSGSGRDSSFTISSLESEDIGSYYCQQYYNYPWTFGPGTKLEIK

SEQ ID NO: 61 - protein, 262 aa, Artificial Sequence
  2C11 Leader-VH-Linker-VL
MDFQVQIFSFLLISASVIMSRGEVQLVESGGGLVQPGKSLKLSCEASGFTFSGYGMHWVRQAPGRGLESVAYITSSSINIKYADAVKGRFTVSRDNAKNLLFLQMNILKSEDTAMYYCARFDWDKNYWGQGTMVTVSSGGGGSGGGGSGGGGSAQDIQMTQSPSSLPASLGDRVTINCQASQDISNYLNWYQQKPGKAPKLLIYYTNKLADGVPSRFSGSGSGRDSSFTISSLESEDIGSYYCQQYYNYPWTFGPGTKLEIK

SEQ ID NO: 62 - protein, 240 aa, Artificial Sequence
  2C11 VH-Linker-VL (without leader)
EVQLVESGGGLVQPGKSLKLSCEASGFTFSGYGMHWVRQAPGRGLESVAYITSSSINIKYADAVKGRFTVSRDNAKNLLFLQMNILKSEDTAMYYCARFDWDKNYWGQGTMVTVSSGGGGSGGGGSGGGGSAQDIQMTQSPSSLPASLGDRVTINCQASQDISNYLNWYQQKPGKAPKLLIYYTNKLADGVPSRFSGSGSGRDSSFTISSLESEDIGSYYCQQYYNYPWTFGPGTKLEIK

SEQ ID NO: 63 - protein, 15 aa, Artificial Sequence
  Human IgG1 hinge; Linker 50
EPKSCDKTHTCPPCP

SEQ ID NO: 64 - protein, 110 aa, Homo sapiens
  Human IgG1 CH2
APELLGGPSVFLFPPKPKDTLMISRTPEVTCVVVDVSHEDPEVKFNWYVDGVEVHNAKTKPREEQYNSTYRVVSVLTVLHQDWLNGKEYKCKVSNKALPAPIEKTISKAK

SEQ ID NO: 65 - protein, 107 aa, Homo sapiens
  Human IgG1 CH3
GQPREPQVYTLPPSRDELTKNQVSLTCLVKGFYPSDIAVEWESNGQPENNYKTTPPVLDSDGSFFLYSKLTVDKSRWQQGNVFSCSVMHEALHNHYTQKSLSLSPGK

SEQ ID NO: 66 - protein, 109 aa, Homo sapiens
  Human IgG2 CH2
APPVAGPSVFLFPPKPKDTLMISRTPEVTCVVVDVSHEDPEVQFNWYVDGMEVHNAKTKPREEQFNSTFRVVSVLTVVHQDWLNGKEYKCKVSNKGLPAPIEKTISKTK

SEQ ID NO: 67 - protein, 107 aa, Homo sapiens
  Human IgG2 CH3
GQPREPQVYTLPPSREEMTKNQVSLTCLVKGFYPSDIAVEWESNGQPENNYKTTPPMLDSDGSFFLYSKLTVDKSRWQQGNVFSCSVMHEALHNHYTQKSLSLSPGK

SEQ ID NO: 68 - protein, 110 aa, Homo sapiens
  Human IgG4 CH2
APEFLGGPSVFLFPPKPKDTLMISRTPEVTCVVVDVSQEDPEVQFNWYVDGVEVHNAKTKPREEQFNSTYRVVSVLTVLHQDWLNGKEYKCKVSNKGLPSSIEKTISKAK

SEQ ID NO: 69 - protein, 107 aa, Homo sapiens
  Human IgG4 CH3
GQPREPQVYTLPPSQEEMTKNQVSLTCLVKGFYPSDIAVEWESNGQPENNYKTTPPVLDSDGSFFLYSRLTVDKSRWQEGNVFSCSVMHEALHNHYTQKSLSLSPGK

SEQ ID NO: 70 - protein, 46 aa, Artificial Sequence
  C-terminal tail sequence
TGLNDIFEAQKIEWHEDYKDDDDKDYKDDDDKDYKDDDDKHHHHHH

SEQ ID NO: 71 - protein, 106 aa, Homo sapiens
  Human IgM CH3
DQDTAIRVFAIPPSFASIFLTKSTKLTCLVTDLTTYDSVTISWTRQNGEAVKTHTNISESHPNATFSAVGEASICEDDWNSGERFTCTVTHTDLPSPLKQTISRPK

SEQ ID NO: 72 - protein, 21 aa, Artificial Sequence
  Mouse IGHG2c hinge; Linker 107
EPRVPITQNPCPPLKECPPCA

SEQ ID NO: 73 - protein, 110 aa, Mus musculus
  Human IGHG2c CH2 domain
APDLLGGPSVFIFPPKIKDVLMISLSPMVTCVVVDVSEDDPDVQISWFVNNVEVHTAQTQTHREDYNSTLRVVSALPIQHQDWMSGKEFKCKVNNRALPSPIEKTISKPR

SEQ ID NO: 74 - protein, 213 aa, Artificial Sequence
  HM1 (IgM CH3:IgG1 CH3) without C-terminal tail
DQDTAIRVFAIPPSFASIFLTKSTKLTCLVTDLTTYDSVTISWTRQNGEAVKTHTNISESHPNATFSAVGEASICEDDWNSGERFTCTVTHTDLPSPLKQTISRPKGQPREPQVYTLPPSRDELTKNQVSLTCLVKGFYPSDIAVEWESNGQPENNYKTTPPVLDSDGSFFLYSKLTVDKSRWQQGNVFSCSVMHEALHNHYTQKSLSLSPGK

SEQ ID NO: 75 - protein, 109 aa, Artificial Sequence
  IgG4 AA CH2
APEAAAPSVFLFPPKPKDTLMISRTPEVTCVVVDVSQEDPEVQFNWYVDGVEVHNAKTKPREEQFASTYRVVSVLTVLHQDWLNGKEYKCKVSNKGLPSSIEKTISKAK

SEQ ID NO: 76 - protein, 498 aa, Artificial Sequence
  BC3 HM1 SMIP without C-terminal tail
MDFQVQIFSFLLISASVIMSRGQVQLQQSAAELARPGASVKMSCKASGYTFTRYTMQWVKQRPGQGLEWIGYINPSSGYIGYSQKFKDKTTLTADKSSSTAYMQLSSLTSEDSAVYYCARSKVYYDYDVYSMDYWGQGTSVTVSSGGGGSGGGGSGGGGSAQQIILTQSPAIMSASPGEKVTMTCSASSSVSYMHWYQQKSGTSPKRWIYDTSKLASGVPARFSGSGSGTSYSLTISSMEAEDAATYYCQQWSSNPLTFGAGTKLELKRTEPKSCDKTHTCPPCPDQDTAIRVFAIPPSFASIFLTKSTKLTCLVTDLTTYDSVTISWTRQNGEAVKTHTNISESHPNATFSAVGEASICEDDWNSGERFTCTVTHTDLPSPLKQTISRPKGQPREPQVYTLPPSRDELTKNQVSLTCLVKGFYPSDIAVEWESNGQPENNYKTTPPVLDSDGSFFLYSKLTVDKSRWQQGNVFSCSVMHEALHNHYTQKSLSLSPGK

SEQ ID NO: 77 - protein, 392 aa, Artificial Sequence
  BC3 delta CH2 SMIP without C-terminal tail
MDFQVQIFSFLLISASVIMSRGQVQLQQSAAELARPGASVKMSCKASGYTFTRYTMQWVKQRPGQGLEWIGYINPSSGYIGYSQKFKDKTTLTADKSSSTAYMQLSSLTSEDSAVYYCARSKVYYDYDVYSMDYWGQGTSVTVSSGGGGSGGGGSGGGGSAQQIILTQSPAIMSASPGEKVTMTCSASSSVSYMHWYQQKSGTSPKRWIYDTSKLASGVPARFSGSGSGTSYSLTISSMEAEDAATYYCQQWSSNPLTFGAGTKLELKRTEPKSCDKTHTCPPCPGQPREPQVYTLPPSRDELTKNQVSLTCLVKGFYPSDIAVEWESNGQPENNYKTTPPVLDSDGSFFLYSKLTVDKSRWQQGNVFSCSVMHEALHNHYTQKSLSLSPGK

SEQ ID NO: 78 - protein, 494 aa, Artificial Sequence
  OKT3 HM1 SMIP without C-terminal tail
MDFQVQIFSFLLISASVIMSRGQVQLQQSGAELARPGASVKMSCKASGYTFTRYTMHWVKQRPGQGLEWIGYINPSRGYTNYNQKFKDKATLTTDKSSSTAYMQLSSLTSEDSAVYYCARYYDDHYCLDYWGQGTTVTVSSGGGGSGGGGSGGGGSAQQIVLTQSPAIMSASPGEKVTMTCSASSSVSYMNWYQQKSGTSPKRWIYDTSKLASGVPAHFRGSGSGTSYSLTISGMEAEDAATYYCQQWSSNPFTFGSGTKLEINRTEPKSCDKTHTCPPCPDQDTAIRVFAIPPSFASIFLTKSTKLTCLVTDLTTYDSVTISWTRQNGEAVKTHTNISESHPNATFSAVGEASICEDDWNSGERFTCTVTHTDLPSPLKQTISRPKGQPREPQVYTLPPSRDELTKNQVSLTCLVKGFYPSDIAVEWESNGQPENNYKTTPPVLDSDGSFFLYSKLTVDKSRWQQGNVFSCSVMHEALHNHYTQKSLSLSPGK

SEQ ID NO: 79 - protein, 388 aa, Artificial Sequence
  OKT3 delta CH2 SMIP without C-terminal tail
MDFQVQIFSFLLISASVIMSRGQVQLQQSGAELARPGASVKMSCKASGYTFTRYTMHWVKQRPGQGLEWIGYINPSRGYTNYNQKFKDKATLTTDKSSSTAYMQLSSLTSEDSAVYYCARYYDDHYCLDYWGQGTTVTVSSGGGGSGGGGSGGGGSAQQIVLTQSPAIMSASPGEKVTMTCSASSSVSYMNWYQQKSGTSPKRWIYDTSKLASGVPAHFRGSGSGTSYSLTISGMEAEDAATYYCQQWSSNPFTFGSGTKLEINRTEPKSCDKTHTCPPCPGQPREPQVYTLPPSRDELTKNQVSLTCLVKGFYPSDIAVEWESNGQPENNYKTTPPVLDSDGSFFLYSKLTVDKSRWQQGNVFSCSVMHEALHNHYTQKSLSLSPGK

SEQ ID NO: 80 - protein, 480 aa, Artificial Sequence
  BC3 G1 N297A SMIP without leader
QVQLQQSAAELARPGASVKMSCKASGYTFTRYTMQWVKQRPGQGLEWIGYINPSSGYIGYSQKFKDKTTLTADKSSSTAYMQLSSLTSEDSAVYYCARSKVYYDYDVYSMDYWGQGTSVTVSSGGGGSGGGGSGGGGSAQQIILTQSPAIMSASPGEKVTMTCSASSSVSYMHWYQQKSGTSPKRWIYDTSKLASGVPARFSGSGSGTSYSLTISSMEAEDAATYYCQQWSSNPLTFGAGTKLELKRTEPKSSDKTHTCPPCPAPELLGGPSVFLFPPKPKDTLMISRTPEVTCVVVDVSHEDPEVKFNWYVDGVEVHNAKTKPREEQYASTYRVVSVLTVLHQDWLNGKEYKCKVSNKALPAPIEKTISKAKGQPREPQVYTLPPSRDELTKNQVSLTCLVKGFYPSDIAVEWESNGQPENNYKTTPPVLDSDGSFFLYSKLTVDKSRWQQGNVFSCSVMHEALHNHYTQKSLSLSPGK

SEQ ID NO: 81 - protein, 479 aa, Artificial Sequence
  BC3 G1 AA SMIP without leader
QVQLQQSAAELARPGASVKMSCKASGYTFTRYTMQWVKQRPGQGLEWIGYINPSSGYIGYSQKFKDKTTLTADKSSSTAYMQLSSLTSEDSAVYYCARSKVYYDYDVYSMDYWGQGTSVTVSSGGGGSGGGGSGGGGSAQQIILTQSPAIMSASPGEKVTMTCSASSSVSYMHWYQQKSGTSPKRWIYDTSKLASGVPARFSGSGSGTSYSLTISSMEAEDAATYYCQQWSSNPLTFGAGTKLELKRTEPKSSDKTHTCPPCPAPEAAAPSVFLFPPKPKDTLMISRTPEVTCVVVDVSHEDPEVKFNWYVDGVEVHNAKTKPREEQYASTYRVVSVLTVLHQDWLNGKEYKCKVSNKALPAPIEKTISKAKGQPREPQVYTLPPSRDELTKNQVSLTCLVKGFYPSDIAVEWESNGQPENNYKTTPPVLDSDGSFFLYSKLTVDKSRWQQGNVFSCSVMHEALHNHYTQKSLSLSPGK

SEQ ID NO: 82 - protein, 479 aa, Artificial Sequence
  BC3 G2 AA SMIP without leader
QVQLQQSAAELARPGASVKMSCKASGYTFTRYTMQWVKQRPGQGLEWIGYINPSSGYIGYSQKFKDKTTLTADKSSSTAYMQLSSLTSEDSAVYYCARSKVYYDYDVYSMDYWGQGTSVTVSSGGGGSGGGGSGGGGSAQQIILTQSPAIMSASPGEKVTMTCSASSSVSYMHWYQQKSGTSPKRWIYDTSKLASGVPARFSGSGSGTSYSLTISSMEAEDAATYYCQQWSSNPLTFGAGTKLELKRTEPKSSDKTHTCPPCPAPEAAAPSVFLFPPKPKDTLMISRTPEVTCVVVDVSHEDPEVQFNWYVDGMEVHNAKTKPREEQFASTFRVVSVLTVVHQDWLNGKEYKCKVSNKGLPAPIEKTISKTKGQPREPQVYTLPPSREEMTKNQVSLTCLVKGFYPSDIAVEWESNGQPENNYKTTPPMLDSDGSFFLYSKLTVDKSRWQQGNVFSCSVMHEALHNHYTQKSLSLSPGK

SEQ ID NO: 83 - protein, 479 aa, Artificial Sequence
  BC3 G4 AA SMIP without leader
QVQLQQSAAELARPGASVKMSCKASGYTFTRYTMQWVKQRPGQGLEWIGYINPSSGYIGYSQKFKDKTTLTADKSSSTAYMQLSSLTSEDSAVYYCARSKVYYDYDVYSMDYWGQGTSVTVSSGGGGSGGGGSGGGGSAQQIILTQSPAIMSASPGEKVTMTCSASSSVSYMHWYQQKSGTSPKRWIYDTSKLASGVPARFSGSGSGTSYSLTISSMEAEDAATYYCQQWSSNPLTFGAGTKLELKRTEPKSSDKTHTCPPCPAPEAAAPSVFLFPPKPKDTLMISRTPEVTCVVVDVSQEDPEVQFNWYVDGVEVHNAKTKPREEQFASTYRVVSVLTVLHQDWLNGKEYKCKVSNKGLPSSIEKTISKAKGQPREPQVYTLPPSQEEMTKNQVSLTCLVKGFYPSDIAVEWESNGQPENNYKTTPPVLDSDGSFFLYSRLTVDKSRWQEGNVFSCSVMHEALHNHYTQKSLSLSPGK

SEQ ID NO: 84 - protein, 522 aa, Artificial Sequence
  BC3 HM1 SMIP without leader
QVQLQQSAAELARPGASVKMSCKASGYTFTRYTMQWVKQRPGQGLEWIGYINPSSGYIGYSQKFKDKTTLTADKSSSTAYMQLSSLTSEDSAVYYCARSKVYYDYDVYSMDYWGQGTSVTVSSGGGGSGGGGSGGGGSAQQIILTQSPAIMSASPGEKVTMTCSASSSVSYMHWYQQKSGTSPKRWIYDTSKLASGVPARFSGSGSGTSYSLTISSMEAEDAATYYCQQWSSNPLTFGAGTKLELKRTEPKSCDKTHTCPPCPDQDTAIRVFAIPPSFASIFLTKSTKLTCLVTDLTTYDSVTISWTRQNGEAVKTHTNISESHPNATFSAVGEASICEDDWNSGERFTCTVTHTDLPSPLKQTISRPKGQPREPQVYTLPPSRDELTKNQVSLTCLVKGFYPSDIAVEWESNGQPENNYKTTPPVLDSDGSFFLYSKLTVDKSRWQQGNVFSCSVMHEALHNHYTQKSLSLSPGKTGLNDIFEAQKIEWHEDYKDDDDKDYKDDDDKDYKDDDDKHHHHHH

SEQ ID NO: 85 - protein, 416 aa, Artificial Sequence
  BC3 delta CH2 SMIP without leader
QVQLQQSAAELARPGASVKMSCKASGYTFTRYTMQWVKQRPGQGLEWIGYINPSSGYIGYSQKFKDKTTLTADKSSSTAYMQLSSLTSEDSAVYYCARSKVYYDYDVYSMDYWGQGTSVTVSSGGGGSGGGGSGGGGSAQQIILTQSPAIMSASPGEKVTMTCSASSSVSYMHWYQQKSGTSPKRWIYDTSKLASGVPARFSGSGSGTSYSLTISSMEAEDAATYYCQQWSSNPLTFGAGTKLELKRTEPKSCDKTHTCPPCPGQPREPQVYTLPPSRDELTKNQVSLTCLVKGFYPSDIAVEWESNGQPENNYKTTPPVLDSDGSFFLYSKLTVDKSRWQQGNVFSCSVMHEALHNHYTQKSLSLSPGKTGLNDIFEAQKIEWHEDYKDDDDKDYKDDDDKDYKDDDDKHHHHHH

SEQ ID NO: 86 - protein, 476 aa, Artificial Sequence
  BC3 HM1 SMIP without N-terminal leader or C-terminal tail
QVQLQQSAAELARPGASVKMSCKASGYTFTRYTMQWVKQRPGQGLEWIGYINPSSGYIGYSQKFKDKTTLTADKSSSTAYMQLSSLTSEDSAVYYCARSKVYYDYDVYSMDYWGQGTSVTVSSGGGGSGGGGSGGGGSAQQIILTQSPAIMSASPGEKVTMTCSASSSVSYMHWYQQKSGTSPKRWIYDTSKLASGVPARFSGSGSGTSYSLTISSMEAEDAATYYCQQWSSNPLTFGAGTKLELKRTEPKSCDKTHTCPPCPDQDTAIRVFAIPPSFASIFLTKSTKLTCLVTDLTTYDSVTISWTRQNGEAVKTHTNISESHPNATFSAVGEASICEDDWNSGERFTCTVTHTDLPSPLKQTISRPKGQPREPQVYTLPPSRDELTKNQVSLTCLVKGFYPSDIAVEWESNGQPENNYKTTPPVLDSDGSFFLYSKLTVDKSRWQQGNVFSCSVMHEALHNHYTQKSLSLSPGK

SEQ ID NO: 87 - protein, 370 aa, Artificial Sequence
  BC3 delta CH2 SMIP without N-terminal leader or C-terminal tail
QVQLQQSAAELARPGASVKMSCKASGYTFTRYTMQWVKQRPGQGLEWIGYINPSSGYIGYSQKFKDKTTLTADKSSSTAYMQLSSLTSEDSAVYYCARSKVYYDYDVYSMDYWGQGTSVTVSSGGGGSGGGGSGGGGSAQQIILTQSPAIMSASPGEKVTMTCSASSSVSYMHWYQQKSGTSPKRWIYDTSKLASGVPARFSGSGSGTSYSLTISSMEAEDAATYYCQQWSSNPLTFGAGTKLELKRTEPKSCDKTHTCPPCPGQPREPQVYTLPPSRDELTKNQVSLTCLVKGFYPSDIAVEWESNGQPENNYKTTPPVLDSDGSFFLYSKLTVDKSRWQQGNVFSCSVMHEALHNHYTQKSLSLSPGK

SEQ ID NO: 88 - protein, 476 aa, Artificial Sequence
  OKT3 G1 N297A SMIP without leader
QVQLQQSGAELARPGASVKMSCKASGYTFTRYTMHWVKQRPGQGLEWIGYINPSRGYTNYNQKFKDKATLTTDKSSSTAYMQLSSLTSEDSAVYYCARYYDDHYCLDYWGQGTTVTVSSGGGGSGGGGSGGGGSAQQIVLTQSPAIMSASPGEKVTMTCSASSSVSYMNWYQQKSGTSPKRWIYDTSKLASGVPAHFRGSGSGTSYSLTISGMEAEDAATYYCQQWSSNPFTFGSGTKLEINRTEPKSSDKTHTCPPCPAPELLGGPSVFLFPPKPKDTLMISRTPEVTCVVVDVSHEDPEVKFNWYVDGVEVHNAKTKPREEQYASTYRVVSVLTVLHQDWLNGKEYKCKVSNKALPAPIEKTISKAKGQPREPQVYTLPPSRDELTKNQVSLTCLVKGFYPSDIAVEWESNGQPENNYKTTPPVLDSDGSFFLYSKLTVDKSRWQQGNVFSCSVMHEALHNHYTQKSLSLSPGK

SEQ ID NO: 89 - protein, 475 aa, Artificial Sequence
  OKT3 G1 AA SMIP without leader
QVQLQQSGAELARPGASVKMSCKASGYTFTRYTMHWVKQRPGQGLEWIGYINPSRGYTNYNQKFKDKATLTTDKSSSTAYMQLSSLTSEDSAVYYCARYYDDHYCLDYWGQGTTVTVSSGGGGSGGGGSGGGGSAQQIVLTQSPAIMSASPGEKVTMTCSASSSVSYMNWYQQKSGTSPKRWIYDTSKLASGVPAHFRGSGSGTSYSLTISGMEAEDAATYYCQQWSSNPFTFGSGTKLEINRTEPKSSDKTHTCPPCPAPEAAAPSVFLFPPKPKDTLMISRTPEVTCVVVDVSHEDPEVKFNWYVDGVEVHNAKTKPREEQYASTYRVVSVLTVLHQDWLNGKEYKCKVSNKALPAPIEKTISKAKGQPREPQVYTLPPSRDELTKNQVSLTCLVKGFYPSDIAVEWESNGQPENNYKTTPPVLDSDGSFFLYSKLTVDKSRWQQGNVFSCSVMHEALHNHYTQKSLSLSPGK

SEQ ID NO: 90 - protein, 475 aa, Artificial Sequence
  OKT3 G2 AA SMIP without leader
QVQLQQSGAELARPGASVKMSCKASGYTFTRYTMHWVKQRPGQGLEWIGYINPSRGYTNYNQKFKDKATLTTDKSSSTAYMQLSSLTSEDSAVYYCARYYDDHYCLDYWGQGTTVTVSSGGGGSGGGGSGGGGSAQQIVLTQSPAIMSASPGEKVTMTCSASSSVSYMNWYQQKSGTSPKRWIYDTSKLASGVPAHFRGSGSGTSYSLTISGMEAEDAATYYCQQWSSNPFTFGSGTKLEINRTEPKSSDKTHTCPPCPAPEAAAPSVFLFPPKPKDTLMISRTPEVTCVVVDVSHEDPEVQFNWYVDGMEVHNAKTKPREEQFASTFRVVSVLTVVHQDWLNGKEYKCKVSNKGLPAPIEKTISKTKGQPREPQVYTLPPSREEMTKNQVSLTCLVKGFYPSDIAVEWESNGQPENNYKTTPPMLDSDGSFFLYSKLTVDKSRWQQGNVFSCSVMHEALHNHYTQKSLSLSPGK

SEQ ID NO: 91 - protein, 475 aa, Artificial Sequence
  OKT3 G4 AA SMIP without leader
QVQLQQSGAELARPGASVKMSCKASGYTFTRYTMHWVKQRPGQGLEWIGYINPSRGYTNYNQKFKDKATLTTDKSSSTAYMQLSSLTSEDSAVYYCARYYDDHYCLDYWGQGTTVTVSSGGGGSGGGGSGGGGSAQQIVLTQSPAIMSASPGEKVTMTCSASSSVSYMNWYQQKSGTSPKRWIYDTSKLASGVPAHFRGSGSGTSYSLTISGMEAEDAATYYCQQWSSNPFTFGSGTKLEINRTEPKSSDKTHTCPPCPAPEAAAPSVFLFPPKPKDTLMISRTPEVTCVVVDVSQEDPEVQFNWYVDGVEVHNAKTKPREEQFASTYRVVSVLTVLHQDWLNGKEYKCKVSNKGLPSSIEKTISKAKGQPREPQVYTLPPSQEEMTKNQVSLTCLVKGFYPSDIAVEWESNGQPENNYKTTPPVLDSDGSFFLYSRLTVDKSRWQEGNVFSCSVMHEALHNHYTQKSLSLSPGK

SEQ ID NO: 92 - protein, 518 aa, Artificial Sequence
  OKT3 HM1 SMIP without leader
QVQLQQSGAELARPGASVKMSCKASGYTFTRYTMHWVKQRPGQGLEWIGYINPSRGYTNYNQKFKDKATLTTDKSSSTAYMQLSSLTSEDSAVYYCARYYDDHYCLDYWGQGTTVTVSSGGGGSGGGGSGGGGSAQQIVLTQSPAIMSASPGEKVTMTCSASSSVSYMNWYQQKSGTSPKRWIYDTSKLASGVPAHFRGSGSGTSYSLTISGMEAEDAATYYCQQWSSNPFTFGSGTKLEINRTEPKSCDKTHTCPPCPDQDTAIRVFAIPPSFASIFLTKSTKLTCLVTDLTTYDSVTISWTRQNGEAVKTHTNISESHPNATFSAVGEASICEDDWNSGERFTCTVTHTDLPSPLKQTISRPKGQPREPQVYTLPPSRDELTKNQVSLTCLVKGFYPSDIAVEWESNGQPENNYKTTPPVLDSDGSFFLYSKLTVDKSRWQQGNVFSCSVMHEALHNHYTQKSLSLSPGKTGLNDIFEAQKIEWHEDYKDDDDKDYKDDDDKDYKDDDDKHHHHHH

SEQ ID NO: 93 - protein, 412 aa, Artificial Sequence
  OKT3 delta CH2 SMIP without leader
QVQLQQSGAELARPGASVKMSCKASGYTFTRYTMHWVKQRPGQGLEWIGYINPSRGYTNYNQKFKDKATLTTDKSSSTAYMQLSSLTSEDSAVYYCARYYDDHYCLDYWGQGTTVTVSSGGGGSGGGGSGGGGSAQQIVLTQSPAIMSASPGEKVTMTCSASSSVSYMNWYQQKSGTSPKRWIYDTSKLASGVPAHFRGSGSGTSYSLTISGMEAEDAATYYCQQWSSNPFTFGSGTKLEINRTEPKSCDKTHTCPPCPGQPREPQVYTLPPSRDELTKNQVSLTCLVKGFYPSDIAVEWESNGQPENNYKTTPPVLDSDGSFFLYSKLTVDKSRWQQGNVFSCSVMHEALHNHYTQKSLSLSPGKTGLNDIFEAQKIEWHEDYKDDDDKDYKDDDDKDYKDDDDKHHHHHH

SEQ ID NO: 94 - protein, 472 aa, Artificial Sequence
  OKT3 HM1 SMIP without N-terminal leader or C-terminal tail
QVQLQQSGAELARPGASVKMSCKASGYTFTRYTMHWVKQRPGQGLEWIGYINPSRGYTNYNQKFKDKATLTTDKSSSTAYMQLSSLTSEDSAVYYCARYYDDHYCLDYWGQGTTVTVSSGGGGSGGGGSGGGGSAQQIVLTQSPAIMSASPGEKVTMTCSASSSVSYMNWYQQKSGTSPKRWIYDTSKLASGVPAHFRGSGSGTSYSLTISGMEAEDAATYYCQQWSSNPFTFGSGTKLEINRTEPKSCDKTHTCPPCPDQDTAIRVFAIPPSFASIFLTKSTKLTCLVTDLTTYDSVTISWTRQNGEAVKTHTNISESHPNATFSAVGEASICEDDWNSGERFTCTVTHTDLPSPLKQTISRPKGQPREPQVYTLPPSRDELTKNQVSLTCLVKGFYPSDIAVEWESNGQPENNYKTTPPVLDSDGSFFLYSKLTVDKSRWQQGNVFSCSVMHEALHNHYTQKSLSLSPGK

SEQ ID NO: 95 - protein, 366 aa, Artificial Sequence
  OKT3 delta CH2 without N-terminal leader or C-terminal tail
QVQLQQSGAELARPGASVKMSCKASGYTFTRYTMHWVKQRPGQGLEWIGYINPSRGYTNYNQKFKDKATLTTDKSSSTAYMQLSSLTSEDSAVYYCARYYDDHYCLDYWGQGTTVTVSSGGGGSGGGGSGGGGSAQQIVLTQSPAIMSASPGEKVTMTCSASSSVSYMNWYQQKSGTSPKRWIYDTSKLASGVPAHFRGSGSGTSYSLTISGMEAEDAATYYCQQWSSNPFTFGSGTKLEINRTEPKSCDKTHTCPPCPGQPREPQVYTLPPSRDELTKNQVSLTCLVKGFYPSDIAVEWESNGQPENNYKTTPPVLDSDGSFFLYSKLTVDKSRWQQGNVFSCSVMHEALHNHYTQKSLSLSPGK

SEQ ID NO: 96 - protein, 484 aa, Artificial Sequence
  H57 null2 SMIP without leader
EVYLVESGGDLVQPGSSLKVSCAASGFTFSDFWMYWVRQAPGKGLEWVGRIKNKPNNYATEYADSVRGRFTISRDDSRNSIYLQMNRLRVDDTAIYYCTRAGRFDHFDYWGQGTMVTVSSGGGGSGGGGSGGGGSAQYELIQPSSASVTVGETVKITCSGDQLPKNFAYWFQQKSDKNILLLIYMDNKRPSGIPERFSGSTSGTTATLTISGAQPEDEAAYYCLSSYGDNNDLVFGSGTQLTVLRTEPRVPITQNPCPPLKECPPCAAPDAAGAPSVFIFPPKIKDVLMISLSPMVTCVVVDVSEDDPDVQISWFVNNVEVHTAQTQTHREDYNSTLRVVSALPIQHQDWMSGKAFACAVNNRALPSPIEKTISKPRGPVRAPQVYVLPPPAEEMTKKEFSLTCMITGFLPAEIAVDWTSNGRTEQNYKNTATVLDSDGSYFMYSKLRVQKSTWERGSLFACSVVHEGLHNHLTTKTISRSLGK

SEQ ID NO: 97 - protein, 480 aa, Artificial Sequence; identical to SEQ ID NO: 59
  2C11 null2 SMIP without leader

SEQ ID NO: 98 - protein, 17 aa, Artificial Sequence
  Modified (G4S)3 linker (AQ as junction amino acids); Linker 85
GGGGSGGGGSGGGGSAQ

SEQ ID NO: 99 - protein, 15 aa, Artificial Sequence
  Human mutated IgG1 Hinge (SCC-P); Linker 47
EPKSSDKTHTCPPCP

SEQ ID NO: 100 - protein, 17 aa, Artificial Sequence
  Human IgG1 WT hinge (RT as junction amino acids); Linker 86
RTEPKSCDKTHTCPPCP

SEQ ID NO: 101 - protein, 217 aa, Artificial Sequence
  Null2 CH2-CH3
APDAAGAPSVFIFPPKIKDVLMISLSPMVTCVVVDVSEDDPDVQISWFVNNVEVHTAQTQTHREDYNSTLRVVSALPIQHQDWMSGKAFACAVNNRALPSPIEKTISKPRGPVRAPQVYVLPPPAEEMTKKEFSLTCMITGFLPAEIAVDWTSNGRTEQNYKNTATVLDSDGSYFMYSKLRVQKSTWERGSLFACSVVHEGLHNHLTTKTISRSLGK

SEQ ID NO: 102 - protein, 110 aa, Artificial Sequence
  IgG1 N297A CH2
APELLGGPSVFLFPPKPKDTLMISRTPEVTCVVVDVSHEDPEVKFNWYVDGVEVHNAKTKPREEQYASTYRVVSVLTVLHQDWLNGKEYKCKVSNKALPAPIEKTISKAK

SEQ ID NO: 103 - protein, 109 aa, Artificial Sequence
  IgG1 AA CH2
APEAAAPSVFLFPPKPKDTLMISRTPEVTCVVVDVSHEDPEVKFNWYVDGVEVHNAKTKPREEQYASTYRVVSVLTVLHQDWLNGKEYKCKVSNKALPAPIEKTISKAK

SEQ ID NO: 104 - protein, 108 aa, Artificial Sequence
  IgG2 AA CH2
APEAAAPSVFLFPPKPKDTLMISRTPEVTCVVVDVSHEDPEVQFNWYVDGMEVHNAKTKPREEQFASTFRVVSVLTVVHQDWLNGKEYKCKVSNKGLPAPIEKTISKT

SEQ ID NO: 105 - protein, 8 aa, Artificial Sequence
  Linker 6
GSPPSPNS

SEQ ID NO: 106 - protein, 8 aa, Artificial Sequence
  Linker 7
GCPPCPNS

SEQ ID NO: 107 - protein, 8 aa, Artificial Sequence
  Linker 8
GCPPCPNS

SEQ ID NO: 108 - protein, 9 aa, Artificial Sequence
  Linker 9
GCPPCPGNS

SEQ ID NO: 109 - protein, 9 aa, Artificial Sequence
  Linker 10
GCPPCPANS

SEQ ID NO: 110 - protein, 9 aa, Artificial Sequence
  Linker 11
GCPPCPANS

SEQ ID NO: 111 - protein, 9 aa, Artificial Sequence
  Linker 12
EEEEDEGNS

SEQ ID NO: 112 - protein, 10 aa, Artificial Sequence
  Linker 13
NYGGGGSGNS

SEQ ID NO: 113 - protein, 10 aa, Artificial Sequence
  Linker 14
VSERPFPPNS

SEQ ID NO: 114 - protein, 11 aa, Artificial Sequence
  Linker 15
EPKSCDKTCCP

SEQ ID NO: 115 - protein, 11 aa, Artificial Sequence
  Linker 16
SQPEIVPISNS

SEQ ID NO: 116 - protein, 12 aa, Artificial Sequence
  Linker 17
GGGGSCPPCPNS

SEQ ID NO: 117 - protein, 12 aa, Artificial Sequence
  Linker 18
KADFLTPSIGNS

SEQ ID NO: 118 - protein, 12 aa, Artificial Sequence
  Linker 19
QMNSELSVLANS

SEQ ID NO: 119 - protein, 13 aa, Artificial Sequence
  Linker 20
EPKSCDKTHTCCP

SEQ ID NO: 120 - protein, 13 aa, Artificial Sequence
  Linker 21
EPKSCDKTCPPCP

SEQ ID NO: 121 - protein, 13 aa, Artificial Sequence
  Linker 22
GGGGSGGGGSGNS

SEQ ID NO: 122 - protein, 13 aa, Artificial Sequence
  Linker 23
GCPPCPGGGGSNS

SEQ ID NO: 123 - protein, 13 aa, Artificial Sequence
  Linker 24
GGGGSCPPCPGNS

SEQ ID NO: 124 - protein, 13 aa, Artificial Sequence
  Linker 25
GCPPCPGGGGSNS

SEQ ID NO: 125 - protein, 13 aa, Artificial Sequence
  Linker 26
GGGASCPPCPGNS

SEQ ID NO: 126 - protein, 13 aa, Artificial Sequence
  Linker 27
GGGASCPPCAGNS

SEQ ID NO: 127 - protein, 13 aa, Artificial Sequence
  Linker 28
GGGASCPPCAGNS

SEQ ID NO: 128 - protein, 15 aa, Artificial Sequence
  Linker 29
NYGGGGSGGGGSGNS

SEQ ID NO: 129 - protein, 15 aa, Artificial Sequence
  Linker 30
LSVKADFLTPSIGNS

SEQ ID NO: 130 - protein, 15 aa, Artificial Sequence
  Linker 31
LSVLANFSQPEIGNS

SEQ ID NO: 131 - protein, 15 aa, Artificial Sequence
  Linker 32
LKIQERVSKPKISNS

SEQ ID NO: 132 - protein, 15 aa, Artificial Sequence
  Linker 33
LDVSERPFPPHIQNS

SEQ ID NO: 133 - protein, 15 aa, Artificial Sequence
  Linker 34
REQLAEVTLSLKANS

SEQ ID NO: 134 - protein, 15 aa, Artificial Sequence
  Linker 35
RIHQMNSELSVLANS

SEQ ID NO: 135 - protein, 15 aa, Artificial Sequence
  Linker 36
DTKGKNVLEKIFSNS

SEQ ID NO: 136 - protein, 15 aa, Artificial Sequence
  Linker 37
LPPETQESQEVTLNS

SEQ ID NO: 137 - protein, 15 aa, Artificial Sequence
  Linker 38
RIHLNVSERPFPPNS

SEQ ID NO: 138 - protein, 15 aa, Artificial Sequence
  Linker 39
LSVKADFLTPSIGNS

SEQ ID NO: 139 - protein, 15 aa, Artificial Sequence
  Linker 40
LSVLANFSQPEIGNS

SEQ ID NO: 140 - protein, 15 aa, Artificial Sequence
  Linker 41
LSVLANFSQPEIGNS

SEQ ID NO: 141 - protein, 15 aa, Artificial Sequence
  Linker 42
RIHQMNSELSVLANS

SEQ ID NO: 142 - protein, 15 aa, Artificial Sequence
  Linker 43
KPFFTCGSADTCPNS

SEQ ID NO: 143 - protein, 15 aa, Artificial Sequence
  Linker 44
KPFFTCGSADTCPNS

SEQ ID NO: 144 - protein, 15 aa, Artificial Sequence
  Linker 45
QYNCPGQYTFSMPNS

SEQ ID NO: 145 - protein, 15 aa, Artificial Sequence
  Linker 46
GGGGSGGGGSGGGGS

SEQ ID NO: 146 - protein, 15 aa, Artificial Sequence
  Linker 48
EPKSSDKTHTCPPCS

SEQ ID NO: 147 - protein, 15 aa, Artificial Sequence
  Linker 49
EPKSCDKTHTSPPCS

SEQ ID NO: 148 - protein, 15 aa, Artificial Sequence
  Linker 51
EPKSCDKTHTSPPSS

SEQ ID NO: 149 - protein, 15 aa, Artificial Sequence
  Linker 52
PRGPTIKPCPPCKCP

SEQ ID NO: 150 - protein, 15 aa, Artificial Sequence
  Linker 53
EPKSSDKTHTSPPSS

SEQ ID NO: 151 - protein, 15 aa, Artificial Sequence
  Linker 54
EPKSSDKTHTSPPCS

SEQ ID NO: 152 - protein, 15 aa, Artificial Sequence
  Linker 55
EPKSSDKTHTCPPSS

SEQ ID NO: 153 - protein, 15 aa, Artificial Sequence
  Linker 56
EPKSCDKTHTSPPCP

SEQ ID NO: 154 - protein, 15 aa, Artificial Sequence
  Linker 57
EPKSSDKTHTSPPSP

SEQ ID NO: 155 - protein, 15 aa, Artificial Sequence
  Linker 58
EPKSSDKTHTSPPCP

SEQ ID NO: 156 - protein, 15 aa, Artificial Sequence
  Linker 59
EPKSCDKTHTSPPSP

SEQ ID NO: 157 - protein, 15 aa, Artificial Sequence
  Linker 60
EPKSSDKTHTCPPSP

SEQ ID NO: 158 - protein, 15 aa, Artificial Sequence
  Linker 61
GGGGCDKTHTCPPCP

SEQ ID NO: 159 - protein, 15 aa, Artificial Sequence
  Linker 62
EPKSCGGGGGCPPCP

SEQ ID NO: 160 - protein, 15 aa, Artificial Sequence
  Linker 63
EPKSCDKTHTCGGCP

SEQ ID NO: 161 - protein, 15 aa, Artificial Sequence
  Linker 64
EPKSCDKTHTCPPCG

SEQ ID NO: 162 - protein, 15 aa, Artificial Sequence
  Linker 65
EPKSCDKTHTCPPSP

SEQ ID NO: 163 - protein, 15 aa, Artificial Sequence
  Linker 66
EPKSCDKCHTCPPCP

SEQ ID NO: 164 - protein, 15 aa, Artificial Sequence
  Linker 67
EPKSCDKTCCCPPCP

SEQ ID NO: 165 - protein, 15 aa, Artificial Sequence
  Linker 68
EPKSCPPPPPCPPCP

SEQ ID NO: 166 - protein, 15 aa, Artificial Sequence
  Linker 69
PPPPCDKTHTCPPCP

SEQ ID NO: 167 - protein, 15 aa, Artificial Sequence
  Linker 70
EPKSCDKTHTCWWCP

SEQ ID NO: 168 - protein, 15 aa, Artificial Sequence
  Linker 71
EPKSCDWWHTCPPCP

SEQ ID NO: 169 - protein, 15 aa, Artificial Sequence
  Linker 72
EPKCSDKTHTCPPCP

SEQ ID NO: 170 - protein, 15 aa, Artificial Sequence
  Linker 73
EPKSDCKTHTCPPCP

SEQ ID NO: 171 - protein, 15 aa, Artificial Sequence
  Linker 74
EPKSDCWWHTCPPCP

SEQ ID NO: 172 - protein, 15 aa, Artificial Sequence
  Linker 75
EPKSCDFFHTCPPCP

SEQ ID NO: 173 - protein, 15 aa, Artificial Sequence
  Linker 76
EPKSCDWWWTCPPCP

SEQ ID NO: 174 - protein, 15 aa, Artificial Sequence
  Linker 77
EPKSCWWTHTCPPCP

SEQ ID NO: 175 - protein, 15 aa, Artificial Sequence
  Linker 78
EPWWCDKTHTCPPCP

SEQ ID NO: 176 - protein, 16 aa, Artificial Sequence
  Linker 79
SQPEIVPISCPPCPNS

SEQ ID NO: 177 - protein, 17 aa, Artificial Sequence
  Linker 80
TGEPKSSDKTHTCPPCP

SEQ ID NO: 178 - protein, 17 aa, Artificial Sequence
  Linker 81
EPKSTDKTHTCPPCPNS

SEQ ID NO: 179 - protein, 17 aa, Artificial Sequence
  Linker 82
EPKSTDKTHTSPPSPNS

SEQ ID NO: 180 - protein, 17 aa, Artificial Sequence
  Linker 83
EPKSTDKTHTCPPCPNS

SEQ ID NO: 181 - protein, 17 aa, Artificial Sequence
  Linker 84
EPKSSDKTHTCPPCPNS

SEQ ID NO: 182 - protein, 18 aa, Artificial Sequence
  Linker 88
EPKSCDKTHTCPGGGPCP

SEQ ID NO: 183 - protein, 18 aa, Artificial Sequence
  Linker 89
EPKSCDGGGKTHTCPPCP

SEQ ID NO: 184 - protein, 18 aa, Artificial Sequence
  Linker 90
EPKSCDPPPKTHTCPPCP

SEQ ID NO: 185 - protein, 18 aa, Artificial Sequence
  Linker 91
EPKSCDKTHTCPPPPPCP

SEQ ID NO: 186 - protein, 18 aa, Artificial Sequence
  Linker 92
GGGGSGGGGSGGGGSGNS

SEQ ID NO: 187 - protein, 18 aa, Artificial Sequence
  Linker 93
SSGGGGSGGGGSGGGGSA

SEQ ID NO: 188 - protein, 19 aa, Artificial Sequence
  Linker 94
NYGGGGSGGGGSGGGGSNS

SEQ ID NO: 189 - protein, 19 aa, Artificial Sequence
  Linker 95
LSVKADFLTPSISPPCPNS

SEQ ID NO: 190 - protein, 19 aa, Artificial Sequence
  Linker 96
SVLANFSQPEISCPPCPNS

SEQ ID NO: 191 - protein, 20 aa, Artificial Sequence
  Linker 97
GQRHNNSSLNTRTQKARHSP

SEQ ID NO: 192 - protein, 20 aa, Artificial Sequence
  Linker 98
LSVLANFSQPEISCPPCPNS

SEQ ID NO: 193 - protein, 20 aa, Artificial Sequence
  Linker 99
LKIQERVSKPKISCPPCPNS

SEQ ID NO: 194 - protein, 20 aa, Artificial Sequence
  Linker 100
REQLAEVTLSLKACPPCPNS

SEQ ID NO: 195 - protein, 20 aa, Artificial Sequence
  Linker 101
RIHQMNSELSVLACPPCPNS

SEQ ID NO: 196 - protein, 20 aa, Artificial Sequence
  Linker 102
RIHLNVSERPFPPCPPCPNS

SEQ ID NO: 197 - protein, 20 aa, Artificial Sequence
  Linker 103
NSLFNQEVQIPLTESYCPNS

SEQ ID NO: 198 - protein, 20 aa, Artificial Sequence
  Linker 104
EEEEDEEDEEDEEEEEDGNS

SEQ ID NO: 199 - protein, 21 aa, Artificial Sequence
  Linker 105
LDVSERPFPPHIQSCPPCPNS

SEQ ID NO: 200 - protein, 21 aa, Artificial Sequence
  Linker 106
DTKGKNVLEKIFDSCPPCPNS

SEQ ID NO: 201 - protein, 21 aa, Artificial Sequence
  Linker 108
LPPETQESQEVTLSCPPCPNS

SEQ ID NO: 202 - protein, 21 aa, Artificial Sequence
  Linker 109
EPAFTPGPNIELQKDSDCPNS

SEQ ID NO: 203 - protein, 21 aa, Artificial Sequence
  Linker 110
QRHNNSSLNTRTQKARHCPNS

SEQ ID NO: 204 - protein, 21 aa, Artificial Sequence
  Linker 111
QRHNNSSLNTRTQKARHSPNS

SEQ ID NO: 205 - protein, 36 aa, Artificial Sequence
  Linker 113
NYGGGGSGGGGSGGGGSNYGGGGSGGGGSGGGGSNS

SEQ ID NO: 206 - protein, 122 aa, Artificial Sequence
  Linker 114
RTRYLQVSQQLQQTNRVLEVTNSSLRQQLRLKITQLGQSAEDLQGSRRELAQSQEALQVEQRAHQAAEGQLQACQADRQKTKETLQSEEQQRRALEQKLSNMENRLKPFFTCGSADTCCPNS

SEQ ID NO: 207 - protein, 2 aa, Artificial Sequence
  Linker 1
NS

SEQ ID NO: 208 - protein, 6 aa, Artificial Sequence
  Linker 2
SCPPCP

SEQ ID NO: 209 - protein, 8 aa, Artificial Sequence
  Linker 3
GGGGSGNS

SEQ ID NO: 210 - protein, 8 aa, Artificial Sequence
  Linker 4
GCPPCPNS

SEQ ID NO: 211 - protein, 8 aa, Artificial Sequence
  Linker 5
GSPPSPNS

SEQ ID NO: 212 - protein, 111 aa, Artificial Sequence
  Linker 115
SRDFTPPTVKILQSSSDGGGHFPPTIQLLCLVSGYTPGTINITWLEDGQVMDVDLSTASTTQEGELASTQSELTLSQKHWLSDRTYTCQVTYQGHTFEDSTKKSACPPCSG

SEQ ID NO: 213 - protein, 52 aa, Artificial Sequence
  Linker 116
QEKEAIERLKAAGAPESLVIQAYFASEKNENLAANFLLSQNFDDECPPCPSG

SEQ ID NO: 214 - protein, 39 aa, Artificial Sequence
  Linker 117
ESPKAQASSVPTAQPQAEGSLAKATTAPATTRNTCPPCP

SEQ ID NO: 215 - protein, 23 aa, Artificial Sequence
  Linker 118
PSTPPTPSPSTPPTPSPSCPPCP

SEQ ID NO: 216 - protein, 20 aa, Artificial Sequence
  Linker 119
EPKSSDKTHTSPPSPCPPCP

SEQ ID NO: 217 - protein, 20 aa, Artificial Sequence
  Linker 120
EPKSSDTPPPSPRSPCPPCP

SEQ ID NO: 218 - protein, 10 aa, Artificial Sequence
  Linker 122
PPPPPCPPCP

SEQ ID NO: 219 - DNA, 363 bp, Artificial Sequence
  Cris7-VH murine hybridoma Nucleotide
caggtccagctgcagcagtctggggctgaactggcaagacctggggcctcagtgaagatgtcctgcaaggcttctggctacacctttactagatctacgatgcactgggtaaaacagaggcctggacagggtctggaatggattggatacattaatcctagcagtgcttatactaattacaatcagaaattcaaggacaaggccacattgactgcagacaaatcctccagtacagcctacatgcaactgagtagcctgacatctgaggactctgcagtctattactgtgcaagtccgcaagtccactatgattacaacgggtttccttactggggccaagggactctggtcactgtctctgca

SEQ ID NO: 220 - protein, 121 aa, Artificial Sequence
  Cris7-VH murine hybridoma Amino Acid
  ACT_SITE (31)...(35): complementarity-determining region
  ACT_SITE (50)...(66): complementarity-determining region
  ACT_SITE (100)...(110): complementarity-determining region
QVQLQQSGAELARPGASVKMSCKASGYTFTRSTMHWVKQRPGQGLEWIGYINPSSAYTNYNQKFKDKATLTADKSSSTAYMQLSSLTSEDSAVYYCASPQVHYDYNGFPYWGQGTLVTVSA

SEQ ID NO: 221 - DNA, 321 bp, Artificial Sequence
  Cris7-VL murine hybridoma Nucleotide
caagttgttctcacccagtctccagcaatcatgtctgcatttccaggggagaaggtcaccatgacctgcagtgccagctcaagtgtaagttacatgaactggtaccagcagaagtcaggcacctcccccaaaagatggatttatgactcatccaaactggcttctggagtccctgctcgcttcagtggcagtgggtctgggacctcttattctctcacaatcagcagcatggagactgaagatgctgccacttattactgccagcagtggagtcgtaacccacccacgttcggaggggggaccaagctacaaattacacgg

SEQ ID NO: 222 - protein, 107 aa, Artificial Sequence
  Cris7-VL murine hybridoma Amino Acid
  ACT_SITE (24)...(33): complementarity-determining region
  ACT_SITE (49)...(55): complementarity-determining region
  ACT_SITE (88)...(96): complementarity-determining region
QVVLTQSPAIMSAFPGEKVTMTCSASSSVSYMNWYQQKSGTSPKRWIYDSSKLASGVPARFSGSGSGTSYSLTISSMETEDAATYYCQQWSRNPPTFGGGTKLQITR

SEQ ID NO: 223 - DNA, 1545 bp, Artificial Sequence
  Chimeric Cris7-(VH-VL) N297A Nucleotide
aagcttccgccatggattttcaagtgcagattttcagcttcctgctaatcagtgcttcagtcataatgtcgcgaggacaggtccagctgcagcagtctggggctgaactggcaagacctggggcctcagtgaagatgtcctgcaaggcttctggctacacctttactagatctacgatgcactgggtaaaacagaggcctggacagggtctggaatggattggatacattaatcctagcagtgcttatactaattacaatcagaaattcaaggacaaggccacattgactgcagacaaatcctccagtacagcctacatgcaactgagtagcctgacatctgaggactctgcagtctattactgtgcaagtccgcaagtccactatgattacaacgggtttccttactggggccaagggactctggtcactgtctctgcaggtggcggagggtctgggggtggcggatccggaggtggtggctctgcacaacaagttgttctcacccagtctccagcaatcatgtctgcatttccaggggagaaggtcaccatgacctgcagtgccagctcaagtgtaagttacatgaactggtaccagcagaagtcaggcacctcccccaaaagatggatttatgactcatccaaactggcttctggagtccctgctcgcttcagtggcagtgggtctgggacctcttattctctcacaatcagcagcatggagactgaagatgctgccacttattactgccagcagtggagtcgtaacccacccacgttcggaggggggaccaagctacaaattacacggcgaactgagcccaaatcttctgacaaaactcacacatgcccaccgtgcccagcacctgaactcctgggtggaccgtcagtcttcctcttccccccaaaacccaaggacaccctcatgatctcccggacccctgaggtcacatgcgtggtggtggacgtgagccacgaagaccctgaggtcaagttcaactggtacgtggacggcgtggaggtgcataatgccaagacaaagccgcgggaggagcagtacgccagcacgtaccgtgtggtcagcgtcctcaccgtcctgcaccaggactggctgaatggcaaggagtacaagtgcaaggtctccaacaaagccctcccagcccccatcgagaaaaccatctccaaagccaaagggcagccccgagaaccacaggtgtacaccctgcccccatcccgggatgagctgaccaagaaccaggtcagcctgacctgcctggtcaaaggcttctatccaagcgacatcgccgtggagtgggagagcaatgggcagccggagaacaactacaagaccacgcctcccgtgctggactccgacggctccttcttcctctacagcaagctcaccgtggacaagagccggtggcagcaggggaacgtcttctcatgctccgtgatgcatgaggctctgcacaaccactacacgcagaagagcctctccctgtctccgggtaaatgaaatgtacagcggccgcctcgagtctaga

SEQ ID NO: 224 - protein, 501 aa, Artificial Sequence
  Chimeric Cris7-(VH-VL) N297A (22 aa leader)
MDFQVQIFSFLLISASVIMSRGQVQLQQSGAELARPGASVKMSCKASGYTFTRSTMHWVKQRPGQGLEWIGYINPSSAYTNYNQKFKDKATLTADKSSSTAYMQLSSLTSEDSAVYYCASPQVHYDYNGFPYWGQGTLVTVSAGGGGSGGGGSGGGGSAQQVVLTQSPAIMSAFPGEKVTMTCSASSSVSYMNWYQQKSGTSPKRWIYDSSKLASGVPARFSGSGSGTSYSLTISSMETEDAATYYCQQWSRNPPTFGGGTKLQITRRTEPKSSDKTHTCPPCPAPELLGGPSVFLFPPKPKDTLMISRTPEVTCVVVDVSHEDPEVKFNWYVDGVEVHNAKTKPREEQYASTYRVVSVLTVLHQDWLNGKEYKCKVSNKALPAPIEKTISKAKGQPREPQVYTLPPSRDELTKNQVSLTCLVKGFYPSDIAVEWESNGQPENNYKTTPPVLDSDGSFFLYSKLTVDKSRWQQGNVFSCSVMHEALHNHYTQKSLSLSPGK

SEQ ID NO: 225 - DNA, 1534 bp, Artificial Sequence
  Chimeric Cris7-(VH-VL) IgG2-AA-N297A Nucleotide
aagcttccgccatggattttcaagtgcagattttcagcttcctgctaatcagtgcttcagtcataatgtcgcgaggacaggtccagctgcagcagtctggggctgaactggcaagacctggggcctcagtgaagatgtcctgcaaggcttctggctacacctttactagatctacgatgcactgggtaaaacagaggcctggacagggtctggaatggattggatacattaatcctagcagtgcttatactaattacaatcagaaattcaaggacaaggccacattgactgcagacaaatcctccagtacagcctacatgcaactgagtagcctgacatctgaggactctgcagtctattactgtgcaagtccgcaagtccactatgattacaacgggtttccttactggggccaagggactctggtcactgtctctgcaggtggcggagggtctgggggtggcggatccggaggtggtggctctgcacaacaagttgttctcacccagtctccagcaatcatgtctgcatttccaggggagaaggtcaccatgacctgcagtgccagctcaagtgtaagttacatgaactggtaccagcagaagtcaggcacctcccccaaaagatggatttatgactcatccaaactggcttctggagtccctgctcgcttcagtggcagtgggtctgggacctcttattctctcacaatcagcagcatggagactgaagatgctgccacttattactgccagcagtggagtcgtaacccacccacgttcggaggggggaccaagctacaaattacacggcgaactgagcccaaatcttctgacaaaactcacacatgcccaccgtgcccagcacctgaagccgcagctccgtcagtcttcctcttccccccaaaacccaaggacaccctcatgatctcccggacccctgaggtcacgtgcgtggtggtggacgtgagccacgaagaccccgaggtccagttcaactggtacgtggacggcatggaggtgcataatgccaagacaaagccacgggaggagcagttcgccagcacgttccgtgtggtcagcgtcctcaccgtcgtgcaccaggactggctgaacggcaaggagtacaagtgcaaggtctccaacaaaggcctcccagcccccatcgagaaaaccatctccaaaaccaaagggcagccccgagaaccacaggtgtacaccctgcccccatcccgggaggagatgaccaagaaccaggtcagcctgacctgcctggtcaaaggcttctaccccagcgacatcgccgtggagtgggagagcaatgggcagccggagaacaactacaagaccacacctcccatgctggactccgacggctccttcttcctctacagcaagctcaccgtggacaagagcaggtggcagcaggggaacgtcttctcatgctccgtgatgcatgaggctctgcacaaccactacacacagaagagcctctccctgtctccgggtaaatgagtgccacggctagctctaga

SEQ ID NO: 226 - protein, 500 aa, Artificial Sequence
  Chimeric Cris7-(VH-VL) IgG2-AA-N297A (22 aa leader)
MDFQVQIFSFLLISASVIMSRGQVQLQQSGAELARPGASVKMSCKASGYTFTRSTMHWVKQRPGQGLEWIGYINPSSAYTNYNQKFKDKATLTADKSSSTAYMQLSSLTSEDSAVYYCASPQVHYDYNGFPYWGQGTLVTVSAGGGGSGGGGSGGGGSAQQVVLTQSPAIMSAFPGEKVTMTCSASSSVSYMNWYQQKSGTSPKRWIYDSSKLASGVPARFSGSGSGTSYSLTISSMETEDAATYYCQQWSRNPPTFGGGTKLQITRRTEPKSSDKTHTCPPCPAPEAAAPSVFLFPPKPKDTLMISRTPEVTCVVVDVSHEDPEVQFNWYVDGMEVHNAKTKPREEQFASTFRVVSVLTVVHQDWLNGKEYKCKVSNKGLPAPIEKTISKTKGQPREPQVYTLPPSREEMTKNQVSLTCLVKGFYPSDIAVEWESNGQPENNYKTTPPMLDSDGSFFLYSKLTVDKSRWQQGNVFSCSVMHEALHNHYTQKSLSLSPGK

SEQ ID NO: 227 - DNA, 1528 bp, Artificial Sequence
  Chimeric Cris7-(VH-VL) IgG4-AA-N297A Nucleotide
aagcttccgccatggattttcaagtgcagattttcagcttcctgctaatcagtgcttcagtcataatgtcgcgaggacaggtccagctgcagcagtctggggctgaactggcaagacctggggcctcagtgaagatgtcctgcaaggcttctggctacacctttactagatctacgatgcactgggtaaaacagaggcctggacagggtctggaatggattggatacattaatcctagcagtgcttatactaattacaatcagaaattcaaggacaaggccacattgactgcagacaaatcctccagtacagcctacatgcaactgagtagcctgacatctgaggactctgcagtctattactgtgcaagtccgcaagtccactatgattacaacgggtttccttactggggccaagggactctggtcactgtctctgcaggtggcggagggtctgggggtggcggatccggaggtggtggctctgcacaacaagttgttctcacccagtctccagcaatcatgtctgcatttccaggggagaaggtcaccatgacctgcagtgccagctcaagtgtaagttacatgaactggtaccagcagaagtcaggcacctcccccaaaagatggatttatgactcatccaaactggcttctggagtccctgctcgcttcagtggcagtgggtctgggacctcttattctctcacaatcagcagcatggagactgaagatgctgccacttattactgccagcagtggagtcgtaacccacccacgttcggaggggggaccaagctacaaattacacggcgaactgagcccaaatcttctgacaaaactcacacatgcccaccgtgcccagcacctgaagccgcagctccgtcagtcttcctcttccccccaaaacccaaggacaccctcatgatctcccggacccctgaggtcacgtgcgtggtggtggacgtgagccaggaagaccccgaggtccagttcaactggtacgtggatggcgtggaggtgcataatgccaagacaaagccgcgggaggagcagttcgccagcacgtaccgtgtggtcagcgtcctcaccgtcctgcaccaggactggctgaacggcaaggagtacaagtgcaaggtctccaacaaaggcctcccgtcctccatcgagaaaaccatctccaaagccaaagggcagccccgagagccacaggtgtacaccctgcccccatcccaggaggagatgaccaagaaccaggtcagcctgacctgcctggtcaaaggcttctaccccagcgacatcgccgtggagtgggagagcaatgggcagccggagaacaactacaagaccacgcctcccgtgctggactccgacggctccttcttcctctacagcaggctaaccgtggacaagagccggtggcaggaggggaatgtcttctcatgctccgtgatgcatgaggctctgcacaaccactacacacagaagagcctctccctgtctccgggtaaatgagtgctagctctaga

SEQ ID NO: 228 - protein, 500 aa, Artificial Sequence
  Chimeric Cris7-(VH-VL) IgG4-AA-N297A (22 aa leader)
MDFQVQIFSFLLISASVIMSRGQVQLQQSGAELARPGASVKMSCKASGYTFTRSTMHWVKQRPGQGLEWIGYINPSSAYTNYNQKFKDKATLTADKSSSTAYMQLSSLTSEDSAVYYCASPQVHYDYNGFPYWGQGTLVTVSAGGGGSGGGGSGGGGSAQQVVLTQSPAIMSAFPGEKVTMTCSASSSVSYMNWYQQKSGTSPKRWIYDSSKLASGVPARFSGSGSGTSYSLTISSMETEDAATYYCQQWSRNPPTFGGGTKLQITRRTEPKSSDKTHTCPPCPAPEAAAPSVFLFPPKPKDTLMISRTPEVTCVVVDVSQEDPEVQFNWYVDGVEVHNAKTKPREEQFASTYRVVSVLTVLHQDWLNGKEYKCKVSNKGLPSSIEKTISKAKGQPREPQVYTLPPSQEEMTKNQVSLTCLVKGFYPSDIAVEWESNGQPENNYKTTPPVLDSDGSFFLYSRLTVDKSRWQEGNVFSCSVMHEALHNHYTQKSLSLSPGK

SEQ ID NO: 229 - DNA, 1649 bp, Artificial Sequence
  Chimeric Cris7-(VH-VL) HM1 Nucleotide
aagcttccgccatggattttcaagtgcagattttcagcttcctgctaatcagtgcttcagtcataatgtcgcgaggacaggtccagctgcagcagtctggggctgaactggcaagacctggggcctcagtgaagatgtcctgcaaggcttctggctacacctttactagatctacgatgcactgggtaaaacagaggcctggacagggtctggaatggattggatacattaatcctagcagtgcttatactaattacaatcagaaattcaaggacaaggccacattgactgcagacaaatcctccagtacagcctacatgcaactgagtagcctgacatctgaggactctgcagtctattactgtgcaagtccgcaagtccactatgattacaacgggtttccttactggggccaagggactctggtcactgtctctgcaggtggcggagggtctgggggtggcggatccggaggtggtggctctgcacaacaagttgttctcacccagtctccagcaatcatgtctgcatttccaggggagaaggtcaccatgacctgcagtgccagctcaagtgtaagttacatgaactggtaccagcagaagtcaggcacctcccccaaaagatggatttatgactcatccaaactggcttctggagtccctgctcgcttcagtggcagtgggtctgggacctcttattctctcacaatcagcagcatggagactgaagatgctgccacttattactgccagcagtggagtcgtaacccacccacgttcggaggggggaccaagctacaaattacacggcgaactgagcccaaatcttgtgacaaaactcacacatgcccaccgtgcccagatcaagacacagccatccgggtcttcgccatccccccatcctttgccagcatcttcctcaccaagtccaccaagttgacctgcctggtcacagacctgaccacctatgacagcgtgaccatctcctggacccgccagaatggcgaagctgtgaaaacccacaccaacatctccgagagccaccccaatgccactttcagcgccgtgggtgaggccagcatctgcgaggatgactggaattccggggagaggttcacgtgcaccgtgacccacacagacctgccctcgccactgaagcagaccatctcccggcccaaggggcagccccgagaaccacaggtgtacaccctgcccccatcccgggatgagctgaccaagaaccaggtcagcctgacctgcctggtcaaaggcttctatcccagcgacatcgccgtggagtgggagagcaatgggcagccggagaacaactacaagaccacgcctcccgtgctggactccgacggctccttcttcctctacagcaagctcaccgtggacaagagcaggtggcagcaggggaacgtcttctcatgctccgtgatgcatgaggctctgcacaaccactacacgcagaagagcctctccctgtccccgggtaaaaccggtctgaacgacatcttcgaggctcagaaaatcgaatggcacgaagattacaaggatgacgacgataaggattacaaggatgacgacgataaggattacaaggatgacgacgataagcatcatcatcatcatcactgatctaga

SEQ ID NO: 230 - protein, 543 aa, Artificial Sequence
  Chimeric Cris7-(VH-VL) HM1 (22 aa leader)
MDFQVQIFSFLLISASVIMSRGQVQLQQSGAELARPGASVKMSCKASGYTFTRSTMHWVKQRPGQGLEWIGYINPSSAYTNYNQKFKDKATLTADKSSSTAYMQLSSLTSEDSAVYYCASPQVHYDYNGFPYWGQGTLVTVSAGGGGSGGGGSGGGGSAQQVVLTQSPAIMSAFPGEKVTMTCSASSSVSYMNWYQQKSGTSPKRWIYDSSKLASGVPARFSGSGSGTSYSLTISSMETEDAATYYCQQWSRNPPTFGGGTKLQITRRTEPKSCDKTHTCPPCPDQDTAIRVFAIPPSFASIFLTKSTKLTCLVTDLTTYDSVTISWTRQNGEAVKTHTNISESHPNATFSAVGEASICEDDWNSGERFTCTVTHTDLPSPLKQTISRPKGQPREPQVYTLPPSRDELTKNQVSLTCLVKGFYPSDIAVEWESNGQPENNYKTTPPVLDSDGSFFLYSKLTVDKSRWQQGNVFSCSVMHEALHNHYTQKSLSLSPGKTGLNDIFEAQKIEWHEDYKDDDDKDYKDDDDKDYKDDDDKHHHHHH

SEQ ID NO: 231 - DNA, 1524 bp, Artificial Sequence
  OKT3-IgG4-WT-N297A Nucleotide
aagcttgccgccatggattttcaagtgcagattttcagcttcctgctaatcagtgcttcagtcataatgtcgcgaggacaggtccagctgcagcagtctggggctgaactggcaagacctggggcctcagtgaagatgtcctgcaaggcttctggctacacctttactaggtacacgatgcactgggtaaaacagaggcctggacagggtctggaatggattggatacattaatcctagccgtggttatactaattacaatcagaagttcaaggacaaggccacattgactacagacaaatcctccagcacagcctacatgcaactgagcagcctgacatctgaggactctgcagtctattactgtgcaagatattatgatgatcattactgccttgactactggggccaaggcaccacggtcaccgtctcaagcggtggcggagggtctgggggtggcggatccggaggtggtggctctgcacaacaaattgttctcacccagtctccagcaatcatgtctgcatctccaggggagaaggtcaccatgacctgcagtgccagctcaagtgtaagttacatgaactggtaccagcagaagtcaggcacctcccccaaaagatggatttatgacacatccaaactggcttctggagtccctgctcacttcaggggcagtgggtctgggacctcttactctctcacaatcagcggcatggaggctgaagatgctgccacttattactgccagcagtggagtagtaacccattcacgttcggctcggggacaaagttggaaataaaccgaactgagcccaaatcttctgacaaaactcacacatgcccaccgtgcccagcacctgaattcctggggggaccgtcagtcttcctcttccccccaaaacccaaggacaccctcatgatctcccggacccctgaggtcacgtgcgtggtggtggacgtgagccaggaagaccccgaggtccagttcaactggtacgtggatggcgtggaggtgcataatgccaagacaaagccgcgggaggagcagttcgccagcacgtaccgtgtggtcagcgtcctcaccgtcctgcaccaggactggctgaacggcaaggagtacaagtgcaaggtctccaacaaaggcctcccgtcctccatcgagaaaaccatctccaaagccaaagggcagccccgagagccacaggtgtacaccctgcccccatcccaggaggagatgaccaagaaccaggtcagcctgacctgcctggtcaaaggcttctaccccagcgacatcgccgtggagtgggagagcaatgggcagccggagaacaactacaagaccacgcctcccgtgctggactccgacggctccttcttcctctacagcaggctaaccgtggacaagagccggtggcaggaggggaatgtcttctcatgctccgtgatgcatgaggctctgcacaaccactacacacagaagagcctctccctgtctccgggtaaatgagtgctagctctagag

SEQ ID NO: 232 - protein, 498 aa, Artificial Sequence
  OKT3-(VH-VL) IgG4-WT-N297A (22 aa leader)
MDFQVQIFSFLLISASVIMSRGQVQLQQSGAELARPGASVKMSCKASGYTFTRYTMHWVKQRPGQGLEWIGYINPSRGYTNYNQKFKDKATLTTDKSSSTAYMQLSSLTSEDSAVYYCARYYDDHYCLDYWGQGTTVTVSSGGGGSGGGGSGGGGSAQQIVLTQSPAIMSASPGEKVTMTCSASSSVSYMNWYQQKSGTSPKRWIYDTSKLASGVPAHFRGSGSGTSYSLTISGMEAEDAATYYCQQWSSNPFTFGSGTKLEINRTEPKSSDKTHTCPPCPAPEFLGGPSVFLFPPKPKDTLMISRTPEVTCVVVDVSQEDPEVQFNWYVDGVEVHNAKTKPREEQFASTYRVVSVLTVLHQDWLNGKEYKCKVSNKGLPSSIEKTISKAKGQPREPQVYTLPPSQEEMTKNQVSLTCLVKGFYPSDIAVEWESNGQPENNYKTTPPVLDSDGSFFLYSRLTVDKSRWQEGNVFSCSVMHEALHNHYTQKSLSLSPGK

SEQ ID NO: 233 - DNA, 1524 bp, Artificial Sequence
  OKT3-(VH-VL) IgG4-ALGG-N297A Nucleotide
aagcttgccgccatggattttcaagtgcagattttcagcttcctgctaatcagtgcttcagtcataatgtcgcgaggacaggtccagctgcagcagtctggggctgaactggcaagacctggggcctcagtgaagatgtcctgcaaggcttctggctacacctttactaggtacacgatgcactgggtaaaacagaggcctggacagggtctggaatggattggatacattaatcctagccgtggttatactaattacaatcagaagttcaaggacaaggccacattgactacagacaaatcctccagcacagcctacatgcaactgagcagcctgacatctgaggactctgcagtctattactgtgcaagatattatgatgatcattactgccttgactactggggccaaggcaccacggtcaccgtctcaagcggtggcggagggtctgggggtggcggatccggaggtggtggctctgcacaacaaattgttctcacccagtctccagcaatcatgtctgcatctccaggggagaaggtcaccatgacctgcagtgccagctcaagtgtaagttacatgaactggtaccagcagaagtcaggcacctcccccaaaagatggatttatgacacatccaaactggcttctggagtccctgctcacttcaggggcagtgggtctgggacctcttactctctcacaatcagcggcatggaggctgaagatgctgccacttattactgccagcagtggagtagtaacccattcacgttcggctcggggacaaagttggaaataaaccgaactgagcccaaatcttctgacaaaactcacacatgcccaccgtgcccagcacctgaagccctggggggaccgtcagtcttcctcttccccccaaaacccaaggacaccctcatgatctcccggacccctgaggtcacgtgcgtggtggtggacgtgagccaggaagaccccgaggtccagttcaactggtacgtggatggcgtggaggtgcataatgccaagacaaagccgcgggaggagcagttcgccagcacgtaccgtgtggtcagcgtcctcaccgtcctgcaccaggactggctgaacggcaaggagtacaagtgcaaggtctccaacaaaggcctcccgtcctccatcgagaaaaccatctccaaagccaaagggcagccccgagagccacaggtgtacaccctgcccccatcccaggaggagatgaccaagaaccaggtcagcctgacctgcctggtcaaaggcttctaccccagcgacatcgccgtggagtgggagagcaatgggcagccggagaacaactacaagaccacgcctcccgtgctggactccgacggctccttcttcctctacagcaggctaaccgtggacaagagccggtggcaggaggggaatgtcttctcatgctccgtgatgcatgaggctctgcacaaccactacacacagaagagcctctccctgtctccgggtaaatgagtgctagctctagag

SEQ ID NO: 234 - protein, 498 aa, Artificial Sequence
  OKT3-(VH-VL) IgG4-ALGG-N297A (22 aa leader)
MDFQVQIFSFLLISASVIMSRGQVQLQQSGAELARPGASVKMSCKASGYTFTRYTMHWVKQRPGQGLEWIGYINPSRGYTNYNQKFKDKATLTTDKSSSTAYMQLSSLTSEDSAVYYCARYYDDHYCLDYWGQGTTVTVSSGGGGSGGGGSGGGGSAQQIVLTQSPAIMSASPGEKVTMTCSASSSVSYMNWYQQKSGTSPKRWIYDTSKLASGVPAHFRGSGSGTSYSLTISGMEAEDAATYYCQQWSSNPFTFGSGTKLEINRTEPKSSDKTHTCPPCPAPEALGGPSVFLFPPKPKDTLMISRTPEVTCVVVDVSQEDPEVQFNWYVDGVEVHNAKTKPREEQFASTYRVVSVLTVLHQDWLNGKEYKCKVSNKGLPSSIEKTISKAKGQPREPQVYTLPPSQEEMTKNQVSLTCLVKGFYPSDIAVEWESNGQPENNYKTTPPVLDSDGSFFLYSRLTVDKSRWQEGNVFSCSVMHEALHNHYTQKSLSLSPGK

SEQ ID NO: 235 - DNA, 1524 bp, Artificial Sequence
  OKT3-(VH-VL) IgG4-FAGG-N297A Nucleotide
aagcttgccgccatggattttcaagtgcagattttcagcttcctgctaatcagtgcttcagtcataatgtcgcgaggacaggtccagctgcagcagtctggggctgaactggcaagacctggggcctcagtgaagatgtcctgcaaggcttctggctacacctttactaggtacacgatgcactgggtaaaacagaggcctggacagggtctggaatggattggatacattaatcctagccgtggttatactaattacaatcagaagttcaaggacaaggccacattgactacagacaaatcctccagcacagcctacatgcaactgagcagcctgacatctgaggactctgcagtctattactgtgcaagatattatgatgatcattactgccttgactactggggccaaggcaccacggtcaccgtctcaagcggtggcggagggtctgggggtggcggatccggaggtggtggctctgcacaacaaattgttctcacccagtctccagcaatcatgtctgcatctccaggggagaaggtcaccatgacctgcagtgccagctcaagtgtaagttacatgaactggtaccagcagaagtcaggcacctcccccaaaagatggatttatgacacatccaaactggcttctggagtccctgctcacttcaggggcagtgggtctgggacctcttactctctcacaatcagcggcatggaggctgaagatgctgccacttattactgccagcagtggagtagtaacccattcacgttcggctcggggacaaagttggaaataaaccgaactgagcccaaatcttctgacaaaactcacacatgcccaccgtgcccagcacctgaattcgcagggggaccgtcagtcttcctcttccccccaaaacccaaggacaccctcatgatctcccggacccctgaggtcacgtgcgtggtggtggacgtgagccaggaagaccccgaggtccagttcaactggtacgtggatggcgtggaggtgcataatgccaagacaaagccgcgggaggagcagttcgccagcacgtaccgtgtggtcagcgtcctcaccgtcctgcaccaggactggctgaacggcaaggagtacaagtgcaaggtctccaacaaaggcctcccgtcctccatcgagaaaaccatctccaaagccaaagggcagccccgagagccacaggtgtacaccctgcccccatcccaggaggagatgaccaagaaccaggtcagcctgacctgcctggtcaaaggcttctaccccagcgacatcgccgtggagtgggagagcaatgggcagccggagaacaactacaagaccacgcctcccgtgctggactccgacggctccttcttcctctacagcaggctaaccgtggacaagagccggtggcaggaggggaatgtcttctcatgctccgtgatgcatgaggctctgcacaaccactacacacagaagagcctctccctgtctccgggtaaatgagtgctagctctagag

SEQ ID NO: 236 - protein, 498 aa, Artificial Sequence
  OKT3-(VH-VL) IgG4-FAGG-N297A (22 aa leader)
MDFQVQIFSFLLISASVIMSRGQVQLQQSGAELARPGASVKMSCKASGYTFTRYTMHWVKQRPGQGLEWIGYINPSRGYTNYNQKFKDKATLTTDKSSSTAYMQLSSLTSEDSAVYYCARYYDDHYCLDYWGQGTTVTVSSGGGGSGGGGSGGGGSAQQIVLTQSPAIMSASPGEKVTMTCSASSSVSYMNWYQQKSGTSPKRWIYDTSKLASGVPAHFRGSGSGTSYSLTISGMEAEDAATYYCQQWSSNPFTFGSGTKLEINRTEPKSSDKTHTCPPCPAPEFAGGPSVFLFPPKPKDTLMISRTPEVTCVVVDVSQEDPEVQFNWYVDGVEVHNAKTKPREEQFASTYRVVSVLTVLHQDWLNGKEYKCKVSNKGLPSSIEKTISKAKGQPREPQVYTLPPSQEEMTKNQVSLTCLVKGFYPSDIAVEWESNGQPENNYKTTPPVLDSDGSFFLYSRLTVDKSRWQEGNVFSCSVMHEALHNHYTQKSLSLSPGK

SEQ ID NO: 237 - DNA, 1524 bp, Artificial Sequence
  OKT3-(VH-VL) IgG4-FLAG-N297A Nucleotide
aagcttgccgccatggattttcaagtgcagattttcagcttcctgctaatcagtgcttcagtcataatgtcgcgaggacaggtccagctgcagcagtctggggctgaactggcaagacctggggcctcagtgaagatgtcctgcaaggcttctggctacacctttactaggtacacgatgcactgggtaaaacagaggcctggacagggtctggaatggattggatacattaatcctagccgtggttatactaattacaatcagaagttcaaggacaaggccacattgactacagacaaatcctccagcacagcctacatgcaactgagcagcctgacatctgaggactctgcagtctattactgtgcaagatattatgatgatcattactgccttgactactggggccaaggcaccacggtcaccgtctcaagcggtggcggagggtctgggggtggcggatccggaggtggtggctctgcacaacaaattgttctcacccagtctccagcaatcatgtctgcatctccaggggagaaggtcaccatgacctgcagtgccagctcaagtgtaagttacatgaactggtaccagcagaagtcaggcacctcccccaaaagatggatttatgacacatccaaactggcttctggagtccctgctcacttcaggggcagtgggtctgggacctcttactctctcacaatcagcggcatggaggctgaagatgctgccacttattactgccagcagtggagtagtaacccattcacgttcggctcggggacaaagttggaaataaaccgaactgagcccaaatcttctgacaaaactcacacatgcccaccgtgcccagcacctgaattcctggctggaccgtcagtcttcctcttccccccaaaacccaaggacaccctcatgatctcccggacccctgaggtcacgtgcgtggtggtggacgtgagccaggaagaccccgaggtccagttcaactggtacgtggatggcgtggaggtgcataatgccaagacaaagccgcgggaggagcagttcgccagcacgtaccgtgtggtcagcgtcctcaccgtcctgcaccaggactggctgaacggcaaggagtacaagtgcaaggtctccaacaaaggcctcccgtcctccatcgagaaaaccatctccaaagccaaagggcagccccgagagccacaggtgtacaccctgcccccatcccaggaggagatgaccaagaaccaggtcagcctgacctgcctggtcaaaggcttctaccccagcgacatcgccgtggagtgggagagcaatgggcagccggagaacaactacaagaccacgcctcccgtgctggactccgacggctccttcttcctctacagcaggctaaccgtggacaagagccggtggcaggaggggaatgtcttctcatgctccgtgatgcatgaggctctgcacaaccactacacacagaagagcctctccctgtctccgggtaaatgagtgctagctctagag

SEQ ID NO: 238 - protein, 498 aa, Artificial Sequence
  OKT3-(VH-VL) IgG4-FLAG-N297A (22 aa leader)
MDFQVQIFSFLLISASVIMSRGQVQLQQSGAELARPGASVKMSCKASGYTFTRYTMHWVKQRPGQGLEWIGYINPSRGYTNYNQKFKDKATLTTDKSSSTAYMQLSSLTSEDSAVYYCARYYDDHYCLDYWGQGTTVTVSSGGGGSGGGGSGGGGSAQQIVLTQSPAIMSASPGEKVTMTCSASSSVSYMNWYQQKSGTSPKRWIYDTSKLASGVPAHFRGSGSGTSYSLTISGMEAEDAATYYCQQWSSNPFTFGSGTKLEINRTEPKSSDKTHTCPPCPAPEFLAGPSVFLFPPKPKDTLMISRTPEVTCVVVDVSQEDPEVQFNWYVDGVEVHNAKTKPREEQFASTYRVVSVLTVLHQDWLNGKEYKCKVSNKGLPSSIEKTISKAKGQPREPQVYTLPPSQEEMTKNQVSLTCLVKGFYPSDIAVEWESNGQPENNYKTTPPVLDSDGSFFLYSRLTVDKSRWQEGNVFSCSVMHEALHNHYTQKSLSLSPGK

SEQ ID NO: 239 - DNA, 1524 bp, Artificial Sequence
  OKT3-(VH-VL) IgG4-FLGA-N297A Nucleotide
aagcttgccgccatggattttcaagtgcagattttcagcttcctgctaatcagtgcttcagtcataatgtcgcgaggacaggtccagctgcagcagtctggggctgaactggcaagacctggggcctcagtgaagatgtcctgcaaggcttctggctacacctttactaggtacacgatgcactgggtaaaacagaggcctggacagggtctggaatggattggatacattaatcctagccgtggttatactaattacaatcagaagttcaaggacaaggccacattgactacagacaaatcctccagcacagcctacatgcaactgagcagcctgacatctgaggactctgcagtctattactgtgcaagatattatgatgatcattactgccttgactactggggccaaggcaccacggtcaccgtctcaagcggtggcggagggtctgggggtggcggatccggaggtggtggctctgcacaacaaattgttctcacccagtctccagcaatcatgtctgcatctccaggggagaaggtcaccatgacctgcagtgccagctcaagtgtaagttacatgaactggtaccagcagaagtcaggcacctcccccaaaagatggatttatgacacatccaaactggcttctggagtccctgctcacttcaggggcagtgggtctgggacctcttactctctcacaatcagcggcatggaggctgaagatgctgccacttattactgccagcagtggagtagtaacccattcacgttcggctcggggacaaagttggaaataaaccgaactgagcccaaatcttctgacaaaactcacacatgcccaccgtgcccagcacctgaattcctgggggctccgtcagtcttcctcttccccccaaaacccaaggacaccctcatgatctcccggacccctgaggtcacgtgcgtggtggtggacgtgagccaggaagaccccgaggtccagttcaactggtacgtggatggcgtggaggtgcataatgccaagacaaagccgcgggaggagcagttcgccagcacgtaccgtgtggtcagcgtcctcaccgtcctgcaccaggactggctgaacggcaaggagtacaagtgcaaggtctccaacaaaggcctcccgtcctccatcgagaaaaccatctccaaagccaaagggcagccccgagagccacaggtgtacaccctgcccccatcccaggaggagatgaccaagaaccaggtcagcctgacctgcctggtcaaaggcttctaccccagcgacatcgccgtggagtgggagagcaatgggcagccggagaacaactacaagaccacgcctcccgtgctggactccgacggctccttcttcctctacagcaggctaaccgtggacaagagccggtggcaggaggggaatgtcttctcatgctccgtgatgcatgaggctctgcacaaccactacacacagaagagcctctccctgtctccgggtaaatgagtgctagctctagag

SEQ ID NO: 240 - protein, 498 aa, Artificial Sequence
  OKT3-(VH-VL) IgG4-FLGA-N297A (22 aa leader)
MDFQVQIFSFLLISASVIMSRGQVQLQQSGAELARPGASVKMSCKASGYTFTRYTMHWVKQRPGQGLEWIGYINPSRGYTNYNQKFKDKATLTTDKSSSTAYMQLSSLTSEDSAVYYCARYYDDHYCLDYWGQGTTVTVSSGGGGSGGGGSGGGGSAQQIVLTQSPAIMSASPGEKVTMTCSASSSVSYMNWYQQKSGTSPKRWIYDTSKLASGVPAHFRGSGSGTSYSLTISGMEAEDAATYYCQQWSSNPFTFGSGTKLEINRTEPKSSDKTHTCPPCPAPEFLGAPSVFLFPPKPKDTLMISRTPEVTCVVVDVSQEDPEVQFNWYVDGVEVHNAKTKPREEQFASTYRVVSVLTVLHQDWLNGKEYKCKVSNKGLPSSIEKTISKAKGQPREPQVYTLPPSQEEMTKNQVSLTCLVKGFYPSDIAVEWESNGQPENNYKTTPPVLDSDGSFFLYSRLTVDKSRWQEGNVFSCSVMHEALHNHYTQKSLSLSPGK

SEQ ID NO: 241 - protein, 107 aa, Artificial Sequence
  HuCris7 VL.1
  ACT_SITE (24)...(33): complementarity-determining region
  ACT_SITE (49)...(55): complementarity-determining region
  ACT_SITE (88)...(96): complementarity-determining region
DIQMTQSPSSLSASVGDRVTMTCSASSSVSYMNWYQQKPGKAPKRWIYDSSKLASGVPARFSGSGSGTDYTLTISSLQPEDFATYYCQQWSRNPPTFGGGTKLQITR

SEQ ID NO: 242 - protein, 107 aa, Artificial Sequence
  HuCris7 VL.2
DIQMTQSPSSLSASVGDRVTITCSASSSVSYMNWYQQTPGKAPKRWIYDSSKLASGVPSRFSGSGSGTDFTLTISSLQPEDIATYYCQQWSRNPPTFGQGTKLQITR

SEQ ID NO: 243 - protein, 121 aa, Artificial Sequence
  HuCris7 VH.1
  ACT_SITE (31)...(35): complementarity-determining region
  ACT_SITE (50)...(66): complementarity-determining region
  ACT_SITE (100)...(110): complementarity-determining region
QVQLVQSGAEVKKPGASVKVSCKASGYTFTRSTMHWVKQRPGQGLEWIGYINPSSAYTNYNQKFKDKATLTADKSSSTAYMQLSSLRSEDTAVYYCARPQVHYDYNGFPYWGQGTLVTVSS

SEQ ID NO: 244 - protein, 121 aa, Artificial Sequence
  HuCris7 VH.2
QVQLVQSGGGVVQPGRSLRLSCKASGYTFTRSTMHWVRQAPGKGLEWIGYINPSSAYTNYNQKFKDKATLTADKSKNTAYMELSSLRSEDTAVYYCARPQVHYDYNGFPYWGQGTLVTVSS

SEQ ID NO: 245 - protein, 121 aa, Artificial Sequence
  HuCRIS7 VH.3
QVQLVQSGGGVVQPGRSLRLSCKASGYTFTRSTMHWVRQAPGKGLEWIGYINPSSAYTNYNQKFKDRFTISADKSKSTAFLQMDSLRPEDTGVYFCARPQVHYDYNGFPYWGQGTPVTVSS

SEQ ID NO: 246 - DNA, 1540 bp, Artificial Sequence
  HuCRIS7 H1-L1 N297A Nucleotide
aagcttgccgccatggattttcaagtgcagattttcagcttcctgctaatcagtgcttcagtcataatgtcgcgaggacaggtccagctggtgcagtctggggctgaagtgaagaagcctggggcctcagtgaaggtgtcctgcaaggcttctggctacacctttactagatctacgatgcactgggtaaaacaggcccctggacagggtctggaatggattggatacattaatcctagcagtgcttatactaattacaatcagaaattcaaggacaaggccacattgactgcagacaaatcctccagtacagcctacatgcaactgagtagcctgaggtctgaggacaccgcagtctattactgtgcacggccccaagtccactatgattacaacgggtttccttactggggccaagggactctggtcactgtctctagcggtggcggagggtctgggggtggcggatccggaggtggtggctctgcacaagacatccagatgacccagtctccaagcagcctgtctgcaagcgtgggggacagggtcaccatgacctgcagtgccagctcaagtgtaagttacatgaactggtaccagcagaagcccggcaaggcccccaaaagatggatttatgactcatccaaactggcttctggagtccctgctcgcttcagtggcagtgggtctgggaccgactataccctcacaatcagcagcctgcagcccgaagatttcgccacttattactgccagcagtggagtcgtaacccacccacgttcggaggggggaccaagctacaaattacacgacgaactgagcccaaatcttctgacaaaactcacacatgcccaccgtgcccagcacctgaactcctgggtggaccgtcagtcttcctcttccccccaaaacccaaggacaccctcatgatctcccggacccctgaggtcacatgcgtggtggtggacgtgagccacgaagaccctgaggtcaagttcaactggtacgtggacggcgtggaggtgcataatgccaagacaaagccgcgggaggagcagtacgccagcacgtaccgtgtggtcagcgtcctcaccgtcctgcaccaggactggctgaatggcaaggagtacaagtgcaaggtctccaacaaagccctcccagcccccatcgagaaaaccatctccaaagccaaagggcagccccgagaaccacaggtgtacaccctgcccccatcccgggatgagctgaccaagaaccaggtcagcctgacctgcctggtcaaaggcttctatccaagcgacatcgccgtggagtgggagagcaatgggcagccggagaacaactacaagaccacgcctcccgtgctggactccgacggctccttcttcctctacagcaagctcaccgtggacaagagccggtggcagcaggggaacgtcttctcatgctccgtgatgcatgaggctctgcacaaccactacacgcagaagagcctctccctgtctccgggtaaatgaaatgtacagcggccgcctcgag

SEQ ID NO: 247 - protein, 501 aa, Artificial Sequence
  HuCRIS7 H1-L1 N297A (22 aa leader) Amino Acid
MDFQVQIFSFLLISASVIMSRGQVQLVQSGAEVKKPGASVKVSCKASGYTFTRSTMHWVKQAPGQGLEWIGYINPSSAYTNYNQKFKDKATLTADKSSSTAYMQLSSLRSEDTAVYYCARPQVHYDYNGFPYWGQGTLVTVSSGGGGSGGGGSGGGGSAQDIQMTQSPSSLSASVGDRVTMTCSASSSVSYMNWYQQKPGKAPKRWIYDSSKLASGVPARFSGSGSGTDYTLTISSLQPEDFATYYCQQWSRNPPTFGGGTKLQITRRTEPKSSDKTHTCPPCPAPELLGGPSVFLFPPKPKDTLMISRTPEVTCVVVDVSHEDPEVKFNWYVDGVEVHNAKTKPREEQYASTYRVVSVLTVLHQDWLNGKEYKCKVSNKALPAPIEKTISKAKGQPREPQVYTLPPSRDELTKNQVSLTCLVKGFYPSDIAVEWESNGQPENNYKTTPPVLDSDGSFFLYSKLTVDKSRWQQGNVFSCSVMHEALHNHYTQKSLSLSPGK

SEQ ID NO: 248 - DNA, 1543 bp, Artificial Sequence
  HuCRIS7 H1-L2 N297A Nucleotide
aagcttgccgccatggattttcaagtgcagattttcagcttcctgctaatcagtgcttcagtcataatgtcgcgaggacaggtccagctggtgcagtctggggctgaagtgaagaagcctggggcctcagtgaaggtgtcctgcaaggcttctggctacacctttactagatctacgatgcactgggtaaaacaggcccctggacagggtctggaatggattggatacattaatcctagcagtgcttatactaattacaatcagaaattcaaggacaaggccacattgactgcagacaaatcctccagtacagcctacatgcaactgagtagcctgaggtctgaggacaccgcagtctattactgtgcacggccccaagtccactatgattacaacgggtttccttactggggccaagggactctggtcactgtctctagcggtggcggagggtctgggggtggcggatccggaggtggtggctctgcacaagacatccagatgacccagtctccaagcagcctgtctgcaagcgtgggggacagggtcaccatcacctgcagtgccagctcaagtgtaagttacatgaactggtaccagcagacccccggcaaggcccccaaaagatggatttatgactcatccaaactggcttctggagtccctagccgcttcagtggcagtgggtctgggaccgacttcaccctcacaatcagcagcctgcagcccgaagatatcgccacttattactgccagcagtggagtcgtaacccacccacgttcggacaggggaccaagctacaaattacacgaactgagcccaaatcttctgacaaaactcacacatgcccaccgtgcccagcacctgaactcctgggtggaccgtcagtcttcctcttccccccaaaacccaaggacaccctcatgatctcccggacccctgaggtcacatgcgtggtggtggacgtgagccacgaagaccctgaggtcaagttcaactggtacgtggacggcgtggaggtgcataatgccaagacaaagccgcgggaggagcagtacgccagcacgtaccgtgtggtcagcgtcctcaccgtcctgcaccaggactggctgaatggcaaggagtacaagtgcaaggtctccaacaaagccctcccagcccccatcgagaaaaccatctccaaagccaaagggcagccccgagaaccacaggtgtacaccctgcccccatcccgggatgagctgaccaagaaccaggtcagcctgacctgcctggtcaaaggcttctatccaagcgacatcgccgtggagtgggagagcaatgggcagccggagaacaactacaagaccacgcctcccgtgctggactccgacggctccttcttcctctacagcaagctcaccgtggacaagagccggtggcagcaggggaacgtcttctcatgctccgtgatgcatgaggctctgcacaaccactacacgcagaagagcctctccctgtctccgggtaaatgaaatgtacagcggccgcctcgagtctaga

SEQ ID NO: 249 - protein, 500 aa, Artificial Sequence
  HuCRIS7 H1-L2 N297A (22 aa leader) Amino Acid
MDFQVQIFSFLLISASVIMSRGQVQLVQSGAEVKKPGASVKVSCKASGYTFTRSTMHWVKQAPGQGLEWIGYINPSSAYTNYNQKFKDKATLTADKSSSTAYMQLSSLRSEDTAVYYCARPQVHYDYNGFPYWGQGTLVTVSSGGGGSGGGGSGGGGSAQDIQMTQSPSSLSASVGDRVTITCSASSSVSYMNWYQQTPGKAPKRWIYDSSKLASGVPSRFSGSGSGTDFTLTISSLQPEDIATYYCQQWSRNPPTFGQGTKLQITRTEPKSSDKTHTCPPCPAPELLGGPSVFLFPPKPKDTLMISRTPEVTCVVVDVSHEDPEVKFNWYVDGVEVHNAKTKPREEQYASTYRVVSVLTVLHQDWLNGKEYKCKVSNKALPAPIEKTISKAKGQPREPQVYTLPPSRDELTKNQVSLTCLVKGFYPSDIAVEWESNGQPENNYKTTPPVLDSDGSFFLYSKLTVDKSRWQQGNVFSCSVMHEALHNHYTQKSLSLSPGK

SEQ ID NO: 250 - DNA, 1543 bp, Artificial Sequence
  HuCRIS7 H2-L1 N297A Nucleotide
aagcttgccgccatggattttcaagtgcagattttcagcttcctgctaatcagtgcttcagtcataatgtcgcgaggacaggtccagctggtgcagtctgggggcggagtggtgcagcctgggcggtcactgaggctgtcctgcaaggcttctggctacacctttactagatctacgatgcactgggtaaggcaggcccctggaaagggtctggaatggattggatacattaatcctagcagtgcttatactaattacaatcagaaattcaaggacaaggccacattgactgcagacaaatccaagaacacagcctacatggagctgagtagcctgaggtctgaggacaccgcagtctattactgtgcacggccccaagtccactatgattacaacgggtttccttactggggccaagggactctggtcactgtctctagcggtggcggagggtctgggggtggcggatccggaggtggtggctctgcacaagacatccagatgacccagtctccaagcagcctgtctgcaagcgtgggggacagggtcaccatgacctgcagtgccagctcaagtgtaagttacatgaactggtaccagcagaagcccggcaaggcccccaaaagatggatttatgactcatccaaactggcttctggagtccctgctcgcttcagtggcagtgggtctgggaccgactataccctcacaatcagcagcctgcagcccgaagatttcgccacttattactgccagcagtggagtcgtaacccacccacgttcggaggggggaccaagctacaaattacacgaactgagcccaaatcttctgacaaaactcacacatgcccaccgtgcccagcacctgaactcctgggtggaccgtcagtcttcctcttccccccaaaacccaaggacaccctcatgatctcccggacccctgaggtcacatgcgtggtggtggacgtgagccacgaagaccctgaggtcaagttcaactggtacgtggacggcgtggaggtgcataatgccaagacaaagccgcgggaggagcagtacgccagcacgtaccgtgtggtcagcgtcctcaccgtcctgcaccaggactggctgaatggcaaggagtacaagtgcaaggtctccaacaaagccctcccagcccccatcgagaaaaccatctccaaagccaaagggcagccccgagaaccacaggtgtacaccctgcccccatcccgggatgagctgaccaagaaccaggtcagcctgacctgcctggtcaaaggcttctatccaagcgacatcgccgtggagtgggagagcaatgggcagccggagaacaactacaagaccacgcctcccgtgctggactccgacggctccttcttcctctacagcaagctcaccgtggacaagagccggtggcagcaggggaacgtcttctcatgctccgtgatgcatgaggctctgcacaaccactacacgcagaagagcctctccctgtctccgggtaaatgaaatgtacagcggccgcctcgagtctaga

SEQ ID NO: 251 - protein, 500 aa, Artificial Sequence
  HuCRIS7 H2-L1 N297A (22 aa leader) Amino Acid
MDFQVQIFSFLLISASVIMSRGQVQLVQSGGGVVQPGRSLRLSCKASGYTFTRSTMHWVRQAPGKGLEWIGYINPSSAYTNYNQKFKDKATLTADKSKNTAYMELSSLRSEDTAVYYCARPQVHYDYNGFPYWGQGTLVTVSSGGGGSGGGGSGGGGSAQDIQMTQSPSSLSASVGDRVTMTCSASSSVSYMNWYQQKPGKAPKRWIYDSSKLASGVPARFSGSGSGTDYTLTISSLQPEDFATYYCQQWSRNPPTFGGGTKLQITRTEPKSSDKTHTCPPCPAPELLGGPSVFLFPPKPKDTLMISRTPEVTCVVVDVSHEDPEVKFNWYVDGVEVHNAKTKPREEQYASTYRVVSVLTVLHQDWLNGKEYKCKVSNKALPAPIEKTISKAKGQPREPQVYTLPPSRDELTKNQVSLTCLVKGFYPSDIAVEWESNGQPENNYKTTPPVLDSDGSFFLYSKLTVDKSRWQQGNVFSCSVMHEALHNHYTQKSLSLSPGK

SEQ ID NO: 252 - DNA, 1543 bp, Artificial Sequence
  HuCRIS7 H2-L2 N297A Nucleotide
aagcttgccgccatggattttcaagtgcagattttcagcttcctgctaatcagtgcttcagtcataatgtcgcgaggacaggtccagctggtgcagtctgggggcggagtggtgcagcctgggcggtcactgaggctgtcctgcaaggcttctggctacacctttactagatctacgatgcactgggtaaggcaggcccctggaaagggtctggaatggattggatacattaatcctagcagtgcttatactaattacaatcagaaattcaaggacaaggccacattgactgcagacaaatccaagaacacagcctacatggagctgagtagcctgaggtctgaggacaccgcagtctattactgtgcacggccccaagtccactatgattacaacgggtttccttactggggccaagggactctggtcactgtctctagcggtggcggagggtctgggggtggcggatccggaggtggtggctctgcacaagacatccagatgacccagtctccaagcagcctgtctgcaagcgtgggggacagggtcaccatcacctgcagtgccagctcaagtgtaagttacatgaactggtaccagcagacccccggcaaggcccccaaaagatggatttatgactcatccaaactggcttctggagtccctagccgcttcagtggcagtgggtctgggaccgacttcaccctcacaatcagcagcctgcagcccgaagatatcgccacttattactgccagcagtggagtcgtaacccacccacgttcggacaggggaccaagctacaaattacacgaactgagcccaaatcttctgacaaaactcacacatgcccaccgtgcccagcacctgaactcctgggtggaccgtcagtcttcctcttccccccaaaacccaaggacaccctcatgatctcccggacccctgaggtcacatgcgtggtggtggacgtgagccacgaagaccctgaggtcaagttcaactggtacgtggacggcgtggaggtgcataatgccaagacaaagccgcgggaggagcagtacgccagcacgtaccgtgtggtcagcgtcctcaccgtcctgcaccaggactggctgaatggcaaggagtacaagtgcaaggtctccaacaaagccctcccagcccccatcgagaaaaccatctccaaagccaaagggcagccccgagaaccacaggtgtacaccctgcccccatcccgggatgagctgaccaagaaccaggtcagcctgacctgcctggtcaaaggcttctatccaagcgacatcgccgtggagtgggagagcaatgggcagccggagaacaactacaagaccacgcctcccgtgctggactccgacggctccttcttcctctacagcaagctcaccgtggacaagagccggtggcagcaggggaacgtcttctcatgctccgtgatgcatgaggctctgcacaaccactacacgcagaagagcctctccctgtctccgggtaaatgaaatgtacagcggccgcctcgagtctaga

SEQ ID NO: 253 - protein, 500 aa, Artificial Sequence
  HuCRIS7 H2-L2 N297A (22 aa leader) Amino Acid
MDFQVQIFSFLLISASVIMSRGQVQLVQSGGGVVQPGRSLRLSCKASGYTFTRSTMHWVRQAPGKGLEWIGYINPSSAYTNYNQKFKDKATLTADKSKNTAYMELSSLRSEDTAVYYCARPQVHYDYNGFPYWGQGTLVTVSSGGGGSGGGGSGGGGSAQDIQMTQSPSSLSASVGDRVTITCSASSSVSYMNWYQQTPGKAPKRWIYDSSKLASGVPSRFSGSGSGTDFTLTISSLQPEDIATYYCQQWSRNPPTFGQGTKLQITRTEPKSSDKTHTCPPCPAPELLGGPSVFLFPPKPKDTLMISRTPEVTCVVVDVSHEDPEVKFNWYVDGVEVHNAKTKPREEQYASTYRVVSVLTVLHQDWLNGKEYKCKVSNKALPAPIEKTISKAKGQPREPQVYTLPPSRDELTKNQVSLTCLVKGFYPSDIAVEWESNGQPENNYKTTPPVLDSDGSFFLYSKLTVDKSRWQQGNVFSCSVMHEALHNHYTQKSLSLSPGK

SEQ ID NO: 254 - DNA, 1540 bp, Artificial Sequence
  HuCRIS7 H3-L1 N297A Nucleotide
aagcttgccgccatggattttcaagtgcagattttcagcttcctgctaatcagtgcttcagtcataatgtcgcgaggacaggtccagctggtgcagtctgggggcggagtggtgcagcctgggcggtcactgaggctgtcctgcaaggcttctggctacacctttactagatctacgatgcactgggtaaggcaggcccctggaaagggtctggaatggattggatacattaatcctagcagtgcttatactaattacaatcagaaattcaaggacaggttcacaatcagcgcagacaaatccaagagcacagccttcctgcagatggacagcctgaggcccgaggacaccggcgtctatttctgtgcacggccccaagtccactatgattacaacgggtttccttactggggccaagggactcccgtcactgtctctagcggtggcggagggtctgggggtggcggatccggaggtggtggctctgcacaagacatccagatgacccagtctccaagcagcctgtctgcaagcgtgggggacagggtcaccatgacctgcagtgccagctcaagtgtaagttacatgaactggtaccagcagaagcccggcaaggcccccaaaagatggatttatgactcatccaaactggcttctggagtccctgctcgcttcagtggcagtgggtctgggaccgactataccctcacaatcagcagcctgcagcccgaagatttcgccacttattactgccagcagtggagtcgtaacccacccacgttcggaggggggaccaagctacaaattacacgacgaactgagcccaaatcttctgacaaaactcacacatgcccaccgtgcccagcacctgaactcctgggtggaccgtcagtcttcctcttccccccaaaacccaaggacaccctcatgatctcccggacccctgaggtcacatgcgtggtggtggacgtgagccacgaagaccctgaggtcaagttcaactggtacgtggacggcgtggaggtgcataatgccaagacaaagccgcgggaggagcagtacgccagcacgtaccgtgtggtcagcgtcctcaccgtcctgcaccaggactggctgaatggcaaggagtacaagtgcaaggtctccaacaaagccctcccagcccccatcgagaaaaccatctccaaagccaaagggcagccccgagaaccacaggtgtacaccctgcccccatcccgggatgagctgaccaagaaccaggtcagcctgacctgcctggtcaaaggcttctatccaagcgacatcgccgtggagtgggagagcaatgggcagccggagaacaactacaagaccacgcctcccgtgctggactccgacggctccttcttcctctacagcaagctcaccgtggacaagagccggtggcagcaggggaacgtcttctcatgctccgtgatgcatgaggctctgcacaaccactacacgcagaagagcctctccctgtctccgggtaaatgaaatgtacagcggccgcctcgag

SEQ ID NO: 255 - protein, 501 aa, Artificial Sequence
  HuCRIS7 H3-L1 N297A (22 aa leader) Amino Acid
MDFQVQIFSFLLISASVIMSRGQVQLVQSGGGVVQPGRSLRLSCKASGYTFTRSTMHWVRQAPGKGLEWIGYINPSSAYTNYNQKFKDRFTISADKSKSTAFLQMDSLRPEDTGVYFCARPQVHYDYNGFPYWGQGTPVTVSSGGGGSGGGGSGGGGSAQDIQMTQSPSSLSASVGDRVTMTCSASSSVSYMNWYQQKPGKAPKRWIYDSSKLASGVPARFSGSGSGTDYTLTISSLQPEDFATYYCQQWSRNPPTFGGGTKLQITRRTEPKSSDKTHTCPPCPAPELLGGPSVFLFPPKPKDTLMISRTPEVTCVVVDVSHEDPEVKFNWYVDGVEVHNAKTKPREEQYASTYRVVSVLTVLHQDWLNGKEYKCKVSNKALPAPIEKTISKAKGQPREPQVYTLPPSRDELTKNQVSLTCLVKGFYPSDIAVEWESNGQPENNYKTTPPVLDSDGSFFLYSKLTVDKSRWQQGNVFSCSVMHEALHNHYTQKSLSLSPGK

SEQ ID NO: 256 - DNA, 1540 bp, Artificial Sequence
  HuCRIS7 H3-L2 N297A Nucleotide
aagcttgccgccatggattttcaagtgcagattttcagcttcctgctaatcagtgcttcagtcataatgtcgcgaggacaggtccagctggtgcagtctgggggcggagtggtgcagcctgggcggtcactgaggctgtcctgcaaggcttctggctacacctttactagatctacgatgcactgggtaaggcaggcccctggaaagggtctggaatggattggatacattaatcctagcagtgcttatactaattacaatcagaaattcaaggacaggttcacaatcagcgcagacaaatccaagagcacagccttcctgcagatggacagcctgaggcccgaggacaccggcgtctatttctgtgcacggccccaagtccactatgattacaacgggtttccttactggggccaagggactcccgtcactgtctctagcggtggcggagggtctgggggtggcggatccggaggtggtggctctgcacaagacatccagatgacccagtctccaagcagcctgtctgcaagcgtgggggacagggtcaccatcacctgcagtgccagctcaagtgtaagttacatgaactggtaccagcagacccccggcaaggcccccaaaagatggatttatgactcatccaaactggcttctggagtccctagccgcttcagtggcagtgggtctgggaccgacttcaccctcacaatcagcagcctgcagcccgaagatatcgccacttattactgccagcagtggagtcgtaacccacccacgttcggacaggggaccaagctacaaattacacgacgaactgagcccaaatcttctgacaaaactcacacatgcccaccgtgcccagcacctgaactcctgggtggaccgtcagtcttcctcttccccccaaaacccaaggacaccctcatgatctcccggacccctgaggtcacatgcgtggtggtggacgtgagccacgaagaccctgaggtcaagttcaactggtacgtggacggcgtggaggtgcataatgccaagacaaagccgcgggaggagcagtacgccagcacgtaccgtgtggtcagcgtcctcaccgtcctgcaccaggactggctgaatggcaaggagtacaagtgcaaggtctccaacaaagccctcccagcccccatcgagaaaaccatctccaaagccaaagggcagccccgagaaccacaggtgtacaccctgcccccatcccgggatgagctgaccaagaaccaggtcagcctgacctgcctggtcaaaggcttctatccaagcgacatcgccgtggagtgggagagcaatgggcagccggagaacaactacaagaccacgcctcccgtgctggactccgacggctccttcttcctctacagcaagctcaccgtggacaagagccggtggcagcaggggaacgtcttctcatgctccgtgatgcatgaggctctgcacaaccactacacgcagaagagcctctccctgtctccgggtaaatgaaatgtacagcggccgcctcgag

SEQ ID NO: 257 - protein, 501 aa, Artificial Sequence
  HuCRIS7 H3-L2 N297A (22 aa leader) Amino Acid
MDFQVQIFSFLLISASVIMSRGQVQLVQSGGGVVQPGRSLRLSCKASGYTFTRSTMHWVRQAPGKGLEWIGYINPSSAYTNYNQKFKDRFTISADKSKSTAFLQMDSLRPEDTGVYFCARPQVHYDYNGFPYWGQGTPVTVSSGGGGSGGGGSGGGGSAQDIQMTQSPSSLSASVGDRVTITCSASSSVSYMNWYQQTPGKAPKRWIYDSSKLASGVPSRFSGSGSGTDFTLTISSLQPEDIATYYCQQWSRNPPTFGQGTKLQITRRTEPKSSDKTHTCPPCPAPELLGGPSVFLFPPKPKDTLMISRTPEVTCVVVDVSHEDPEVKFNWYVDGVEVHNAKTKPREEQYASTYRVVSVLTVLHQDWLNGKEYKCKVSNKALPAPIEKTISKAKGQPREPQVYTLPPSRDELTKNQVSLTCLVKGFYPSDIAVEWESNGQPENNYKTTPPVLDSDGSFFLYSKLTVDKSRWQQGNVFSCSVMHEALHNHYTQKSLSLSPGK

SEQ ID NO: 258 - protein, 245 aa, Artificial Sequence
  Cris7-(VH-VL)
  SITE (122)...(138): Linker
QVQLQQSGAELARPGASVKMSCKASGYTFTRSTMHWVKQRPGQGLEWIGYINPSSAYTNYNQKFKDKATLTADKSSSTAYMQLSSLTSEDSAVYYCASPQVHYDYNGFPYWGQGTLVTVSAGGGGSGGGGSGGGGSAQQVVLTQSPAIMSAFPGEKVTMTCSASSSVSYMNWYQQKSGTSPKRWIYDSSKLASGVPARFSGSGSGTSYSLTISSMETEDAATYYCQQWSRNPPTFGGGTKLQITR

SEQ ID NO: 259 - protein, 245 aa, Artificial Sequence
  HuCris7-(VH1-VL1)
  SITE (122)...(138): Linker
QVQLVQSGAEVKKPGASVKVSCKASGYTFTRSTMHWVKQAPGQGLEWIGYINPSSAYTNYNQKFKDKATLTADKSSSTAYMQLSSLRSEDTAVYYCARPQVHYDYNGFPYWGQGTLVTVSSGGGGSGGGGSGGGGSAQDIQMTQSPSSLSASVGDRVTMTCSASSSVSYMNWYQQKPGKAPKRWIYDSSKLASGVPARFSGSGSGTDYTLTISSLQPEDFATYYCQQWSRNPPTFGGGTKLQITR

SEQ ID NO: 260 - protein, 245 aa, Artificial Sequence
  HuCris7-(VH1-VL2)
  SITE (122)...(138): Linker
QVQLVQSGAEVKKPGASVKVSCKASGYTFTRSTMHWVKQAPGQGLEWIGYINPSSAYTNYNQKFKDKATLTADKSSSTAYMQLSSLRSEDTAVYYCARPQVHYDYNGFPYWGQGTLVTVSSGGGGSGGGGSGGGGSAQDIQMTQSPSSLSASVGDRVTITCSASSSVSYMNWYQQTPGKAPKRWIYDSSKLASGVPSRFSGSGSGTDFTLTISSLQPEDIATYYCQQWSRNPPTFGQGTKLQITR

SEQ ID NO: 261 - protein, 245 aa, Artificial Sequence
  HuCris7-(VH2-VL1)
  SITE (122)...(138): Linker
QVQLVQSGGGVVQPGRSLRLSCKASGYTFTRSTMHWVRQAPGKGLEWIGYINPSSAYTNYNQKFKDKATLTADKSKNTAYMELSSLRSEDTAVYYCARPQVHYDYNGFPYWGQGTLVTVSSGGGGSGGGGSGGGGSAQDIQMTQSPSSLSASVGDRVTMTCSASSSVSYMNWYQQKPGKAPKRWIYDSSKLASGVPARFSGSGSGTDYTLTISSLQPEDFATYYCQQWSRNPPTFGGGTKLQITR

SEQ ID NO: 262 - protein, 245 aa, Artificial Sequence
  HuCris7-(VH2-VL2)
  SITE (122)...(138): Linker
QVQLVQSGGGVVQPGRSLRLSCKASGYTFTRSTMHWVRQAPGKGLEWIGYINPSSAYTNYNQKFKDKATLTADKSKNTAYMELSSLRSEDTAVYYCARPQVHYDYNGFPYWGQGTLVTVSSGGGGSGGGGSGGGGSAQDIQMTQSPSSLSASVGDRVTITCSASSSVSYMNWYQQTPGKAPKRWIYDSSKLASGVPSRFSGSGSGTDFTLTISSLQPEDIATYYCQQWSRNPPTFGQGTKLQITR

SEQ ID NO: 263 - protein, 245 aa, Artificial Sequence
  HuCris7-(VH3-VL1)
  SITE (122)...(138): Liniker
QVQLVQSGGGVVQPGRSLRLSCKASGYTFTRSTMHWVRQAPGKGLEWIGYINPSSAYTNYNQKFKDRFTISADKSKSTAFLQMDSLRPEDTGVYFCARPQVHYDYNGFPYWGQGTPVTVSSGGGGSGGGGSGGGGSAQDIQMTQSPSSLSASVGDRVTMTCSASSSVSYMNWYQQKPGKAPKRWIYDSSKLASGVPARFSGSGSGTDYTLTISSLQPEDFATYYCQQWSRNPPTFGGGTKLQITR

SEQ ID NO: 264 - protein, 245 aa, Artificial Sequence
  HuCris7-(VH3-VL2)
  SITE (122)...(138): Linker
QVQLVQSGGGVVQPGRSLRLSCKASGYTFTRSTMHWVRQAPGKGLEWIGYINPSSAYTNYNQKFKDRFTISADKSKSTAFLQMDSLRPEDTGVYFCARPQVHYDYNGFPYWGQGTPVTVSSGGGGSGGGGSGGGGSAQDIQMTQSPSSLSASVGDRVTITCSASSSVSYMNWYQQTPGKAPKRWIYDSSKLASGVPSRFSGSGSGTDFTLTISSLQPEDIATYYCQQWSRNPPTFGQGTKLQITR

SEQ ID NO: 265 - protein, 479 aa, Artificial Sequence
  Chimeric Cris7 IgG1-N297A (No leader)
QVQLQQSGAELARPGASVKMSCKASGYTFTRSTMHWVKQRPGQGLEWIGYINPSSAYTNYNQKFKDKATLTADKSSSTAYMQLSSLTSEDSAVYYCASPQVHYDYNGFPYWGQGTLVTVSAGGGGSGGGGSGGGGSAQQVVLTQSPAIMSAFPGEKVTMTCSASSSVSYMNWYQQKSGTSPKRWIYDSSKLASGVPARFSGSGSGTSYSLTISSMETEDAATYYCQQWSRNPPTFGGGTKLQITRRTEPKSSDKTHTCPPCPAPELLGGPSVFLFPPKPKDTLMISRTPEVTCVVVDVSHEDPEVKFNWYVDGVEVHNAKTKPREEQYASTYRVVSVLTVLHQDWLNGKEYKCKVSNKALPAPIEKTISKAKGQPREPQVYTLPPSRDELTKNQVSLTCLVKGFYPSDIAVEWESNGQPENNYKTTPPVLDSDGSFFLYSKLTVDKSRWQQGNVFSCSVMHEALHNHYTQKSLSLSPGK

SEQ ID NO: 266 - protein, 477 aa, Artificial Sequence
  Chimeric Cris7-(VH-VL) IgG1-AA-N297A (No leader)
QVQLQQSGAELARPGASVKMSCKASGYTFTRSTMHWVKQRPGQGLEWIGYINPSSAYTNYNQKFKDKATLTADKSSSTAYMQLSSLTSEDSAVYYCASPQVHYDYNGFPYWGQGTLVTVSAGGGGSGGGGSGGGGSAQQVVLTQSPAIMSAFPGEKVTMTCSASSSVSYMNWYQQKSGTSPKRWIYDSSKLASGVPARFSGSGSGTSYSLTISSMETEDAATYYCQQWSRNPPTFGGGTKLQITRTEPKSSDKTHTCPPCPAPEAAAPSVFLFPPKPKDTLMISRTPEVTCVVVDVSHEDPEVKFNWYVDGVEVHNAKTKPREEQYASTYRVVSVLTVLHQDWLNGKEYKCKVSNKALPAPIEKTISKAKGQPREPQVYTLPPSRDELTKNQVSLTCLVKGFYPSDIAVEWESNGQPENNYKTTPPVLDSDGSFFLYSKLTVDKSRWQQGNVFSCSVMHEALHNHYTQKSLSLSPGK

SEQ ID NO: 267 - protein, 478 aa, Artificial Sequence
  Chimeric Cris7-(VH-VL) IgG2-AA-N297A (No leader)
QVQLQQSGAELARPGASVKMSCKASGYTFTRSTMHWVKQRPGQGLEWIGYINPSSAYTNYNQKFKDKATLTADKSSSTAYMQLSSLTSEDSAVYYCASPQVHYDYNGFPYWGQGTLVTVSAGGGGSGGGGSGGGGSAQQVVLTQSPAIMSAFPGEKVTMTCSASSSVSYMNWYQQKSGTSPKRWIYDSSKLASGVPARFSGSGSGTSYSLTISSMETEDAATYYCQQWSRNPPTFGGGTKLQITRRTEPKSSDKTHTCPPCPAPEAAAPSVFLFPPKPKDTLMISRTPEVTCVVVDVSHEDPEVQFNWYVDGMEVHNAKTKPREEQFASTFRVVSVLTVVHQDWLNGKEYKCKVSNKGLPAPIEKTISKTKGQPREPQVYTLPPSREEMTKNQVSLTCLVKGFYPSDIAVEWESNGQPENNYKTTPPMLDSDGSFFLYSKLTVDKSRWQQGNVFSCSVMHEALHNHYTQKSLSLSPGK

SEQ ID NO: 268 - protein, 478 aa, Artificial Sequence
  Chimeric Cris7-(VH-VL) IgG4-AA-N297A (No leader)
QVQLQQSGAELARPGASVKMSCKASGYTFTRSTMHWVKQRPGQGLEWIGYINPSSAYTNYNQKFKDKATLTADKSSSTAYMQLSSLTSEDSAVYYCASPQVHYDYNGFPYWGQGTLVTVSAGGGGSGGGGSGGGGSAQQVVLTQSPAIMSAFPGEKVTMTCSASSSVSYMNWYQQKSGTSPKRWIYDSSKLASGVPARFSGSGSGTSYSLTISSMETEDAATYYCQQWSRNPPTFGGGTKLQITRRTEPKSSDKTHTCPPCPAPEAAAPSVFLFPPKPKDTLMISRTPEVTCVVVDVSQEDPEVQFNWYVDGVEVHNAKTKPREEQFASTYRVVSVLTVLHQDWLNGKEYKCKVSNKGLPSSIEKTISKAKGQPREPQVYTLPPSQEEMTKNQVSLTCLVKGFYPSDIAVEWESNGQPENNYKTTPPVLDSDGSFFLYSRLTVDKSRWQEGNVFSCSVMHEALHNHYTQKSLSLSPGK

SEQ ID NO: 269 - protein, 521 aa, Artificial Sequence
  Chimeric Cris7-(VH-VL) HM1 (No leader)
QVQLQQSGAELARPGASVKMSCKASGYTFTRSTMHWVKQRPGQGLEWIGYINPSSAYTNYNQKFKDKATLTADKSSSTAYMQLSSLTSEDSAVYYCASPQVHYDYNGFPYWGQGTLVTVSAGGGGSGGGGSGGGGSAQQVVLTQSPAIMSAFPGEKVTMTCSASSSVSYMNWYQQKSGTSPKRWIYDSSKLASGVPARFSGSGSGTSYSLTISSMETEDAATYYCQQWSRNPPTFGGGTKLQITRRTEPKSCDKTHTCPPCPDQDTAIRVFAIPPSFASIFLTKSTKLTCLVTDLTTYDSVTISWTRQNGEAVKTHTNISESHPNATFSAVGEASICEDDWNSGERFTCTVTHTDLPSPLKQTISRPKGQPREPQVYTLPPSRDELTKNQVSLTCLVKGFYPSDIAVEWESNGQPENNYKTTPPVLDSDGSFFLYSKLTVDKSRWQQGNVFSCSVMHEALHNHYTQKSLSLSPGKTGLNDIFEAQKIEWHEDYKDDDDKDYKDDDDKDYKDDDDKHHHHHH

SEQ ID NO: 270 - protein, 478 aa, Artificial Sequence
  HuCris7-(VH1-VL1) IgG1-N297A (No leader)
QVQLVQSGAEVKKPGASVKVSCKASGYTFTRSTMHWVKQAPGQGLEWIGYINPSSAYTNYNQKFKDKATLTADKSSSTAYMQLSSLRSEDTAVYYCARPQVHYDYNGFPYWGQGTLVTVSSGGGGSGGGGSGGGGSAQDIQMTQSPSSLSASVGDRVTMTCSASSSVSYMNWYQQKPGKAPKRWIYDSSKLASGVPARFSGSGSGTDYTLTISSLQPEDFATYYCQQWSRNPPTFGGGTKLQITRTEPKSSDKTHTCPPCPAPELLGGPSVFLFPPKPKDTLMISRTPEVTCVVVDVSHEDPEVKFNWYVDGVEVHNAKTKPREEQYASTYRVVSVLTVLHQDWLNGKEYKCKVSNKALPAPIEKTISKAKGQPREPQVYTLPPSRDELTKNQVSLTCLVKGFYPSDIAVEWESNGQPENNYKTTPPVLDSDGSFFLYSKLTVDKSRWQQGNVFSCSVMHEALHNHYTQKSLSLSPGK

SEQ ID NO: 271 - protein, 477 aa, Artificial Sequence
  HuCris7-(VH1-VL1) IgG1-AA-N297A (No leader)
QVQLVQSGAEVKKPGASVKVSCKASGYTFTRSTMHWVKQAPGQGLEWIGYINPSSAYTNYNQKFKDKATLTADKSSSTAYMQLSSLRSEDTAVYYCARPQVHYDYNGFPYWGQGTLVTVSSGGGGSGGGGSGGGGSAQDIQMTQSPSSLSASVGDRVTMTCSASSSVSYMNWYQQKPGKAPKRWIYDSSKLASGVPARFSGSGSGTDYTLTISSLQPEDFATYYCQQWSRNPPTFGGGTKLQITRTEPKSSDKTHTCPPCPAPEAAAPSVFLFPPKPKDTLMISRTPEVTCVVVDVSHEDPEVKFNWYVDGVEVHNAKTKPREEQYASTYRVVSVLTVLHQDWLNGKEYKCKVSNKALPAPIEKTISKAKGQPREPQVYTLPPSRDELTKNQVSLTCLVKGFYPSDIAVEWESNGQPENNYKTTPPVLDSDGSFFLYSKLTVDKSRWQQGNVFSCSVMHEALHNHYTQKSLSLSPGK

SEQ ID NO: 272 - protein, 477 aa, Artificial Sequence
  HuCris7-(VH1-VL1) IgG2-AA-N297A (No leader)
QVQLVQSGAEVKKPGASVKVSCKASGYTFTRSTMHWVKQAPGQGLEWIGYINPSSAYTNYNQKFKDKATLTADKSSSTAYMQLSSLRSEDTAVYYCARPQVHYDYNGFPYWGQGTLVTVSSGGGGSGGGGSGGGGSAQDIQMTQSPSSLSASVGDRVTMTCSASSSVSYMNWYQQKPGKAPKRWIYDSSKLASGVPARFSGSGSGTDYTLTISSLQPEDFATYYCQQWSRNPPTFGGGTKLQITRTEPKSSDKTHTCPPCPAPEAAAPSVFLFPPKPKDTLMISRTPEVTCVVVDVSHEDPEVQFNWYVDGMEVHNAKTKPREEQFASTFRVVSVLTVVHQDWLNGKEYKCKVSNKGLPAPIEKTISKTKGQPREPQVYTLPPSREEMTKNQVSLTCLVKGFYPSDIAVEWESNGQPENNYKTTPPMLDSDGSFFLYSKLTVDKSRWQQGNVFSCSVMHEALHNHYTQKSLSLSPGK

SEQ ID NO: 273 - protein, 477 aa, Artificial Sequence
  HuCris7-(VH1-VL1) IgG4-AA-N297A (No leader)
QVQLVQSGAEVKKPGASVKVSCKASGYTFTRSTMHWVKQAPGQGLEWIGYINPSSAYTNYNQKFKDKATLTADKSSSTAYMQLSSLRSEDTAVYYCARPQVHYDYNGFPYWGQGTLVTVSSGGGGSGGGGSGGGGSAQDIQMTQSPSSLSASVGDRVTMTCSASSSVSYMNWYQQKPGKAPKRWIYDSSKLASGVPARFSGSGSGTDYTLTISSLQPEDFATYYCQQWSRNPPTFGGGTKLQITRTEPKSSDKTHTCPPCPAPEAAAPSVFLFPPKPKDTLMISRTPEVTCVVVDVSQEDPEVQFNWYVDGVEVHNAKTKPREEQFASTYRVVSVLTVLHQDWLNGKEYKCKVSNKGLPSSIEKTISKAKGQPREPQVYTLPPSQEEMTKNQVSLTCLVKGFYPSDIAVEWESNGQPENNYKTTPPVLDSDGSFFLYSRLTVDKSRWQEGNVFSCSVMHEALHNHYTQKSLSLSPGK

SEQ ID NO: 274 - protein, 520 aa, Artificial Sequence
  HuCris7-(VH1-VL1) HM1 (No leader)
QVQLVQSGAEVKKPGASVKVSCKASGYTFTRSTMHWVKQAPGQGLEWIGYINPSSAYTNYNQKFKDKATLTADKSSSTAYMQLSSLRSEDTAVYYCARPQVHYDYNGFPYWGQGTLVTVSSGGGGSGGGGSGGGGSAQDIQMTQSPSSLSASVGDRVTMTCSASSSVSYMNWYQQKPGKAPKRWIYDSSKLASGVPARFSGSGSGTDYTLTISSLQPEDFATYYCQQWSRNPPTFGGGTKLQITRTEPKSCDKTHTCPPCPDQDTAIRVFAIPPSFASIFLTKSTKLTCLVTDLTTYDSVTISWTRQNGEAVKTHTNISESHPNATFSAVGEASICEDDWNSGERFTCTVTHTDLPSPLKQTISRPKGQPREPQVYTLPPSRDELTKNQVSLTCLVKGFYPSDIAVEWESNGQPENNYKTTPPVLDSDGSFFLYSKLTVDKSRWQQGNVFSCSVMHEALHNHYTQKSLSLSPGKTGLNDIFEAQKIEWHEDYKDDDDKDYKDDDDKDYKDDDDKHHHHHH

SEQ ID NO: 275 - protein, 478 aa, Artificial Sequence
  HuCris7-(VH1-VL2) IgG1-N297A (No leader)
QVQLVQSGAEVKKPGASVKVSCKASGYTFTRSTMHWVKQAPGQGLEWIGYINPSSAYTNYNQKFKDKATLTADKSSSTAYMQLSSLRSEDTAVYYCARPQVHYDYNGFPYWGQGTLVTVSSGGGGSGGGGSGGGGSAQDIQMTQSPSSLSASVGDRVTITCSASSSVSYMNWYQQTPGKAPKRWIYDSSKLASGVPSRFSGSGSGTDFTLTISSLQPEDIATYYCQQWSRNPPTFGQGTKLQITRTEPKSSDKTHTCPPCPAPELLGGPSVFLFPPKPKDTLMISRTPEVTCVVVDVSHEDPEVKFNWYVDGVEVHNAKTKPREEQYASTYRVVSVLTVLHQDWLNGKEYKCKVSNKALPAPIEKTISKAKGQPREPQVYTLPPSRDELTKNQVSLTCLVKGFYPSDIAVEWESNGQPENNYKTTPPVLDSDGSFFLYSKLTVDKSRWQQGNVFSCSVMHEALHNHYTQKSLSLSPGK

SEQ ID NO: 276 - protein, 477 aa, Artificial Sequence
  HuCris7-(VH1-VL2) IgG1-AA-N297A (No leader)
QVQLVQSGAEVKKPGASVKVSCKASGYTFTRSTMHWVKQAPGQGLEWIGYINPSSAYTNYNQKFKDKATLTADKSSSTAYMQLSSLRSEDTAVYYCARPQVHYDYNGFPYWGQGTLVTVSSGGGGSGGGGSGGGGSAQDIQMTQSPSSLSASVGDRVTITCSASSSVSYMNWYQQTPGKAPKRWIYDSSKLASGVPSRFSGSGSGTDFTLTISSLQPEDIATYYCQQWSRNPPTFGQGTKLQITRTEPKSSDKTHTCPPCPAPEAAAPSVFLFPPKPKDTLMISRTPEVTCVVVDVSHEDPEVKFNWYVDGVEVHNAKTKPREEQYASTYRVVSVLTVLHQDWLNGKEYKCKVSNKALPAPIEKTISKAKGQPREPQVYTLPPSRDELTKNQVSLTCLVKGFYPSDIAVEWESNGQPENNYKTTPPVLDSDGSFFLYSKLTVDKSRWQQGNVFSCSVMHEALHNHYTQKSLSLSPGK

SEQ ID NO: 277 - protein, 477 aa, Artificial Sequence
  HuCris7-(VH1-VL2) IgG2-AA-N297A (No leader)
QVQLVQSGAEVKKPGASVKVSCKASGYTFTRSTMHWVKQAPGQGLEWIGYINPSSAYTNYNQKFKDKATLTADKSSSTAYMQLSSLRSEDTAVYYCARPQVHYDYNGFPYWGQGTLVTVSSGGGGSGGGGSGGGGSAQDIQMTQSPSSLSASVGDRVTITCSASSSVSYMNWYQQTPGKAPKRWIYDSSKLASGVPSRFSGSGSGTDFTLTISSLQPEDIATYYCQQWSRNPPTFGQGTKLQITRTEPKSSDKTHTCPPCPAPEAAAPSVFLFPPKPKDTLMISRTPEVTCVVVDVSHEDPEVQFNWYVDGMEVHNAKTKPREEQFASTFRVVSVLTVVHQDWLNGKEYKCKVSNKGLPAPIEKTISKTKGQPREPQVYTLPPSREEMTKNQVSLTCLVKGFYPSDIAVEWESNGQPENNYKTTPPMLDSDGSFFLYSKLTVDKSRWQQGNVFSCSVMHEALHNHYTQKSLSLSPGK

SEQ ID NO: 278 - protein, 477 aa, Artificial Sequence
  HuCris7-(VH1-VL2) IgG4-AA-N297A (No leader)
QVQLVQSGAEVKKPGASVKVSCKASGYTFTRSTMHWVKQAPGQGLEWIGYINPSSAYTNYNQKFKDKATLTADKSSSTAYMQLSSLRSEDTAVYYCARPQVHYDYNGFPYWGQGTLVTVSSGGGGSGGGGSGGGGSAQDIQMTQSPSSLSASVGDRVTITCSASSSVSYMNWYQQTPGKAPKRWIYDSSKLASGVPSRFSGSGSGTDFTLTISSLQPEDIATYYCQQWSRNPPTFGQGTKLQITRTEPKSSDKTHTCPPCPAPEAAAPSVFLFPPKPKDTLMISRTPEVTCVVVDVSQEDPEVQFNWYVDGVEVHNAKTKPREEQFASTYRVVSVLTVLHQDWLNGKEYKCKVSNKGLPSSIEKTISKAKGQPREPQVYTLPPSQEEMTKNQVSLTCLVKGFYPSDIAVEWESNGQPENNYKTTPPVLDSDGSFFLYSRLTVDKSRWQEGNVFSCSVMHEALHNHYTQKSLSLSPGK

SEQ ID NO: 279 - protein, 520 aa, Artificial Sequence
  HuCris7-(VH1-VL2) HM1 (No leader)
QVQLVQSGAEVKKPGASVKVSCKASGYTFTRSTMHWVKQAPGQGLEWIGYINPSSAYTNYNQKFKDKATLTADKSSSTAYMQLSSLRSEDTAVYYCARPQVHYDYNGFPYWGQGTLVTVSSGGGGSGGGGSGGGGSAQDIQMTQSPSSLSASVGDRVTITCSASSSVSYMNWYQQTPGKAPKRWIYDSSKLASGVPSRFSGSGSGTDFTLTISSLQPEDIATYYCQQWSRNPPTFGQGTKLQITRTEPKSCDKTHTCPPCPDQDTAIRVFAIPPSFASIFLTKSTKLTCLVTDLTTYDSVTISWTRQNGEAVKTHTNISESHPNATFSAVGEASICEDDWNSGERFTCTVTHTDLPSPLKQTISRPKGQPREPQVYTLPPSRDELTKNQVSLTCLVKGFYPSDIAVEWESNGQPENNYKTTPPVLDSDGSFFLYSKLTVDKSRWQQGNVFSCSVMHEALHNHYTQKSLSLSPGKTGLNDIFEAQKIEWHEDYKDDDDKDYKDDDDKDYKDDDDKHHHHHH

SEQ ID NO: 280 - protein, 478 aa, Artificial Sequence
  HuCris7-(VH2-VL1) IgG1-N297A (No leader)
QVQLVQSGGGVVQPGRSLRLSCKASGYTFTRSTMHWVRQAPGKGLEWIGYINPSSAYTNYNQKFKDKATLTADKSKNTAYMELSSLRSEDTAVYYCARPQVHYDYNGFPYWGQGTLVTVSSGGGGSGGGGSGGGGSAQDIQMTQSPSSLSASVGDRVTMTCSASSSVSYMNWYQQKPGKAPKRWIYDSSKLASGVPARFSGSGSGTDYTLTISSLQPEDFATYYCQQWSRNPPTFGGGTKLQITRTEPKSSDKTHTCPPCPAPELLGGPSVFLFPPKPKDTLMISRTPEVTCVVVDVSHEDPEVKFNWYVDGVEVHNAKTKPREEQYASTYRVVSVLTVLHQDWLNGKEYKCKVSNKALPAPIEKTISKAKGQPREPQVYTLPPSRDELTKNQVSLTCLVKGFYPSDIAVEWESNGQPENNYKTTPPVLDSDGSFFLYSKLTVDKSRWQQGNVFSCSVMHEALHNHYTQKSLSLSPGK

SEQ ID NO: 281 - protein, 477 aa, Artificial Sequence
  HuCris7-(VH2-VL1) IgG1-AA-N297A (No leader)
QVQLVQSGGGVVQPGRSLRLSCKASGYTFTRSTMHWVRQAPGKGLEWIGYINPSSAYTNYNQKFKDKATLTADKSKNTAYMELSSLRSEDTAVYYCARPQVHYDYNGFPYWGQGTLVTVSSGGGGSGGGGSGGGGSAQDIQMTQSPSSLSASVGDRVTMTCSASSSVSYMNWYQQKPGKAPKRWIYDSSKLASGVPARFSGSGSGTDYTLTISSLQPEDFATYYCQQWSRNPPTFGGGTKLQITRTEPKSSDKTHTCPPCPAPEAAAPSVFLFPPKPKDTLMISRTPEVTCVVVDVSHEDPEVKFNWYVDGVEVHNAKTKPREEQYASTYRVVSVLTVLHQDWLNGKEYKCKVSNKALPAPIEKTISKAKGQPREPQVYTLPPSRDELTKNQVSLTCLVKGFYPSDIAVEWESNGQPENNYKTTPPVLDSDGSFFLYSKLTVDKSRWQQGNVFSCSVMHEALHNHYTQKSLSLSPGK

SEQ ID NO: 282 - protein, 477 aa, Artificial Sequence
  HuCris7-(VH2-VL1) IgG2-AA-N297A (No leader)
QVQLVQSGGGVVQPGRSLRLSCKASGYTFTRSTMHWVRQAPGKGLEWIGYINPSSAYTNYNQKFKDKATLTADKSKNTAYMELSSLRSEDTAVYYCARPQVHYDYNGFPYWGQGTLVTVSSGGGGSGGGGSGGGGSAQDIQMTQSPSSLSASVGDRVTMTCSASSSVSYMNWYQQKPGKAPKRWIYDSSKLASGVPARFSGSGSGTDYTLTISSLQPEDFATYYCQQWSRNPPTFGGGTKLQITRTEPKSSDKTHTCPPCPAPEAAAPSVFLFPPKPKDTLMISRTPEVTCVVVDVSHEDPEVQFNWYVDGMEVHNAKTKPREEQFASTFRVVSVLTVVHQDWLNGKEYKCKVSNKGLPAPIEKTISKTKGQPREPQVYTLPPSREEMTKNQVSLTCLVKGFYPSDIAVEWESNGQPENNYKTTPPMLDSDGSFFLYSKLTVDKSRWQQGNVFSCSVMHEALHNHYTQKSLSLSPGK

SEQ ID NO: 283 - protein, 477 aa, Artificial Sequence
  HuCris7-(VH2-VL1) IgG4-AA-N297A (No leader)
QVQLVQSGGGVVQPGRSLRLSCKASGYTFTRSTMHWVRQAPGKGLEWIGYINPSSAYTNYNQKFKDKATLTADKSKNTAYMELSSLRSEDTAVYYCARPQVHYDYNGFPYWGQGTLVTVSSGGGGSGGGGSGGGGSAQDIQMTQSPSSLSASVGDRVTMTCSASSSVSYMNWYQQKPGKAPKRWIYDSSKLASGVPARFSGSGSGTDYTLTISSLQPEDFATYYCQQWSRNPPTFGGGTKLQITRTEPKSSDKTHTCPPCPAPEAAAPSVFLFPPKPKDTLMISRTPEVTCVVVDVSQEDPEVQFNWYVDGVEVHNAKTKPREEQFASTYRVVSVLTVLHQDWLNGKEYKCKVSNKGLPSSIEKTISKAKGQPREPQVYTLPPSQEEMTKNQVSLTCLVKGFYPSDIAVEWESNGQPENNYKTTPPVLDSDGSFFLYSRLTVDKSRWQEGNVFSCSVMHEALHNHYTQKSLSLSPGK

SEQ ID NO: 284 - protein, 520 aa, Artificial Sequence
  HuCris7-(VH2-VL1) HM1 (No leader)
QVQLVQSGGGVVQPGRSLRLSCKASGYTFTRSTMHWVRQAPGKGLEWIGYINPSSAYTNYNQKFKDKATLTADKSKNTAYMELSSLRSEDTAVYYCARPQVHYDYNGFPYWGQGTLVTVSSGGGGSGGGGSGGGGSAQDIQMTQSPSSLSASVGDRVTMTCSASSSVSYMNWYQQKPGKAPKRWIYDSSKLASGVPARFSGSGSGTDYTLTISSLQPEDFATYYCQQWSRNPPTFGGGTKLQITRTEPKSCDKTHTCPPCPDQDTAIRVFAIPPSFASIFLTKSTKLTCLVTDLTTYDSVTISWTRQNGEAVKTHTNISESHPNATFSAVGEASICEDDWNSGERFTCTVTHTDLPSPLKQTISRPKGQPREPQVYTLPPSRDELTKNQVSLTCLVKGFYPSDIAVEWESNGQPENNYKTTPPVLDSDGSFFLYSKLTVDKSRWQQGNVFSCSVMHEALHNHYTQKSLSLSPGKTGLNDIFEAQKIEWHEDYKDDDDKDYKDDDDKDYKDDDDKHHHHHH

SEQ ID NO: 285 - protein, 478 aa, Artificial Sequence
  HuCris7-(VH2-VL2) IgG1-N297A (No leader)
QVQLVQSGGGVVQPGRSLRLSCKASGYTFTRSTMHWVRQAPGKGLEWIGYINPSSAYTNYNQKFKDKATLTADKSKNTAYMELSSLRSEDTAVYYCARPQVHYDYNGFPYWGQGTLVTVSSGGGGSGGGGSGGGGSAQDIQMTQSPSSLSASVGDRVTITCSASSSVSYMNWYQQTPGKAPKRWIYDSSKLASGVPSRFSGSGSGTDFTLTISSLQPEDIATYYCQQWSRNPPTFGQGTKLQITRTEPKSSDKTHTCPPCPAPELLGGPSVFLFPPKPKDTLMISRTPEVTCVVVDVSHEDPEVKFNWYVDGVEVHNAKTKPREEQYASTYRVVSVLTVLHQDWLNGKEYKCKVSNKALPAPIEKTISKAKGQPREPQVYTLPPSRDELTKNQVSLTCLVKGFYPSDIAVEWESNGQPENNYKTTPPVLDSDGSFFLYSKLTVDKSRWQQGNVFSCSVMHEALHNHYTQKSLSLSPGK

SEQ ID NO: 286 - protein, 477 aa, Artificial Sequence
  HuCris7-(VH2-VL2) IgG1-AA-N297A (No leader)
QVQLVQSGGGVVQPGRSLRLSCKASGYTFTRSTMHWVRQAPGKGLEWIGYINPSSAYTNYNQKFKDKATLTADKSKNTAYMELSSLRSEDTAVYYCARPQVHYDYNGFPYWGQGTLVTVSSGGGGSGGGGSGGGGSAQDIQMTQSPSSLSASVGDRVTITCSASSSVSYMNWYQQTPGKAPKRWIYDSSKLASGVPSRFSGSGSGTDFTLTISSLQPEDIATYYCQQWSRNPPTFGQGTKLQITRTEPKSSDKTHTCPPCPAPEAAAPSVFLFPPKPKDTLMISRTPEVTCVVVDVSHEDPEVKFNWYVDGVEVHNAKTKPREEQYASTYRVVSVLTVLHQDWLNGKEYKCKVSNKALPAPIEKTISKAKGQPREPQVYTLPPSRDELTKNQVSLTCLVKGFYPSDIAVEWESNGQPENNYKTTPPVLDSDGSFFLYSKLTVDKSRWQQGNVFSCSVMHEALHNHYTQKSLSLSPGK

SEQ ID NO: 287 - protein, 477 aa, Artificial Sequence
  HuCris7-(VH2-VL2) IgG2-AA-N297A (No leader)
QVQLVQSGGGVVQPGRSLRLSCKASGYTFTRSTMHWVRQAPGKGLEWIGYINPSSAYTNYNQKFKDKATLTADKSKNTAYMELSSLRSEDTAVYYCARPQVHYDYNGFPYWGQGTLVTVSSGGGGSGGGGSGGGGSAQDIQMTQSPSSLSASVGDRVTITCSASSSVSYMNWYQQTPGKAPKRWIYDSSKLASGVPSRFSGSGSGTDFTLTISSLQPEDIATYYCQQWSRNPPTFGQGTKLQITRTEPKSSDKTHTCPPCPAPEAAAPSVFLFPPKPKDTLMISRTPEVTCVVVDVSHEDPEVQFNWYVDGMEVHNAKTKPREEQFASTFRVVSVLTVVHQDWLNGKEYKCKVSNKGLPAPIEKTISKTKGQPREPQVYTLPPSREEMTKNQVSLTCLVKGFYPSDIAVEWESNGQPENNYKTTPPMLDSDGSFFLYSKLTVDKSRWQQGNVFSCSVMHEALHNHYTQKSLSLSPGK

SEQ ID NO: 288 - protein, 477 aa, Artificial Sequence
  HuCris7-(VH2-VL2) IgG4-AA-N297A (No leader)
QVQLVQSGGGVVQPGRSLRLSCKASGYTFTRSTMHWVRQAPGKGLEWIGYINPSSAYTNYNQKFKDKATLTADKSKNTAYMELSSLRSEDTAVYYCARPQVHYDYNGFPYWGQGTLVTVSSGGGGSGGGGSGGGGSAQDIQMTQSPSSLSASVGDRVTITCSASSSVSYMNWYQQTPGKAPKRWIYDSSKLASGVPSRFSGSGSGTDFTLTISSLQPEDIATYYCQQWSRNPPTFGQGTKLQITRTEPKSSDKTHTCPPCPAPEAAAPSVFLFPPKPKDTLMISRTPEVTCVVVDVSQEDPEVQFNWYVDGVEVHNAKTKPREEQFASTYRVVSVLTVLHQDWLNGKEYKCKVSNKGLPSSIEKTISKAKGQPREPQVYTLPPSQEEMTKNQVSLTCLVKGFYPSDIAVEWESNGQPENNYKTTPPVLDSDGSFFLYSRLTVDKSRWQEGNVFSCSVMHEALHNHYTQKSLSLSPGK

SEQ ID NO: 289 - protein, 520 aa, Artificial Sequence
  HuCris7-(VH2-VL2) HM1 (No leader)
QVQLVQSGGGVVQPGRSLRLSCKASGYTFTRSTMHWVRQAPGKGLEWIGYINPSSAYTNYNQKFKDKATLTADKSKNTAYMELSSLRSEDTAVYYCARPQVHYDYNGFPYWGQGTLVTVSSGGGGSGGGGSGGGGSAQDIQMTQSPSSLSASVGDRVTITCSASSSVSYMNWYQQTPGKAPKRWIYDSSKLASGVPSRFSGSGSGTDFTLTISSLQPEDIATYYCQQWSRNPPTFGQGTKLQITRTEPKSCDKTHTCPPCPDQDTAIRVFAIPPSFASIFLTKSTKLTCLVTDLTTYDSVTISWTRQNGEAVKTHTNISESHPNATFSAVGEASICEDDWNSGERFTCTVTHTDLPSPLKQTISRPKGQPREPQVYTLPPSRDELTKNQVSLTCLVKGFYPSDIAVEWESNGQPENNYKTTPPVLDSDGSFFLYSKLTVDKSRWQQGNVFSCSVMHEALHNHYTQKSLSLSPGKTGLNDIFEAQKIEWHEDYKDDDDKDYKDDDDKDYKDDDDKHHHHHH

SEQ ID NO: 290 - protein, 478 aa, Artificial Sequence
  HuCris7-(VH3-VL1) IgG1-N297A (No leader)
QVQLVQSGGGVVQPGRSLRLSCKASGYTFTRSTMHWVRQAPGKGLEWIGYINPSSAYTNYNQKFKDRFTISADKSKSTAFLQMDSLRPEDTGVYFCARPQVHYDYNGFPYWGQGTPVTVSSGGGGSGGGGSGGGGSAQDIQMTQSPSSLSASVGDRVTMTCSASSSVSYMNWYQQKPGKAPKRWIYDSSKLASGVPARFSGSGSGTDYTLTISSLQPEDFATYYCQQWSRNPPTFGGGTKLQITRTEPKSSDKTHTCPPCPAPELLGGPSVFLFPPKPKDTLMISRTPEVTCVVVDVSHEDPEVKFNWYVDGVEVHNAKTKPREEQYASTYRVVSVLTVLHQDWLNGKEYKCKVSNKALPAPIEKTISKAKGQPREPQVYTLPPSRDELTKNQVSLTCLVKGFYPSDIAVEWESNGQPENNYKTTPPVLDSDGSFFLYSKLTVDKSRWQQGNVFSCSVMHEALHNHYTQKSLSLSPGK

SEQ ID NO: 291 - protein, 477 aa, Artificial Sequence
  HuCris7-(VH3-VL1) IgG1-AA-N297A (No leader)
QVQLVQSGGGVVQPGRSLRLSCKASGYTFTRSTMHWVRQAPGKGLEWIGYINPSSAYTNYNQKFKDRFTISADKSKSTAFLQMDSLRPEDTGVYFCARPQVHYDYNGFPYWGQGTPVTVSSGGGGSGGGGSGGGGSAQDIQMTQSPSSLSASVGDRVTMTCSASSSVSYMNWYQQKPGKAPKRWIYDSSKLASGVPARFSGSGSGTDYTLTISSLQPEDFATYYCQQWSRNPPTFGGGTKLQITRTEPKSSDKTHTCPPCPAPEAAAPSVFLFPPKPKDTLMISRTPEVTCVVVDVSHEDPEVKFNWYVDGVEVHNAKTKPREEQYASTYRVVSVLTVLHQDWLNGKEYKCKVSNKALPAPIEKTISKAKGQPREPQVYTLPPSRDELTKNQVSLTCLVKGFYPSDIAVEWESNGQPENNYKTTPPVLDSDGSFFLYSKLTVDKSRWQQGNVFSCSVMHEALHNHYTQKSLSLSPGK

SEQ ID NO: 292 - protein, 477 aa, Artificial Sequence
  HuCris7-(VH3-VL1) IgG2-AA-N297A (No leader)
QVQLVQSGGGVVQPGRSLRLSCKASGYTFTRSTMHWVRQAPGKGLEWIGYINPSSAYTNYNQKFKDRFTISADKSKSTAFLQMDSLRPEDTGVYFCARPQVHYDYNGFPYWGQGTPVTVSSGGGGSGGGGSGGGGSAQDIQMTQSPSSLSASVGDRVTMTCSASSSVSYMNWYQQKPGKAPKRWIYDSSKLASGVPARFSGSGSGTDYTLTISSLQPEDFATYYCQQWSRNPPTFGGGTKLQITRTEPKSSDKTHTCPPCPAPEAAAPSVFLFPPKPKDTLMISRTPEVTCVVVDVSHEDPEVQFNWYVDGMEVHNAKTKPREEQFASTFRVVSVLTVVHQDWLNGKEYKCKVSNKGLPAPIEKTISKTKGQPREPQVYTLPPSREEMTKNQVSLTCLVKGFYPSDIAVEWESNGQPENNYKTTPPMLDSDGSFFLYSKLTVDKSRWQQGNVFSCSVMHEALHNHYTQKSLSLSPGK

SEQ ID NO: 293 - protein, 477 aa, Artificial Sequence
  HuCris7-(VH3-VL1) IgG4-AA-N297A (No leader)
QVQLVQSGGGVVQPGRSLRLSCKASGYTFTRSTMHWVRQAPGKGLEWIGYINPSSAYTNYNQKFKDRFTISADKSKSTAFLQMDSLRPEDTGVYFCARPQVHYDYNGFPYWGQGTPVTVSSGGGGSGGGGSGGGGSAQDIQMTQSPSSLSASVGDRVTMTCSASSSVSYMNWYQQKPGKAPKRWIYDSSKLASGVPARFSGSGSGTDYTLTISSLQPEDFATYYCQQWSRNPPTFGGGTKLQITRTEPKSSDKTHTCPPCPAPEAAAPSVFLFPPKPKDTLMISRTPEVTCVVVDVSQEDPEVQFNWYVDGVEVHNAKTKPREEQFASTYRVVSVLTVLHQDWLNGKEYKCKVSNKGLPSSIEKTISKAKGQPREPQVYTLPPSQEEMTKNQVSLTCLVKGFYPSDIAVEWESNGQPENNYKTTPPVLDSDGSFFLYSRLTVDKSRWQEGNVFSCSVMHEALHNHYTQKSLSLSPGK

SEQ ID NO: 294 - protein, 520 aa, Artificial Sequence
  HuCris7-(VH3-VL1) HM1 (No leader)
QVQLVQSGGGVVQPGRSLRLSCKASGYTFTRSTMHWVRQAPGKGLEWIGYINPSSAYTNYNQKFKDRFTISADKSKSTAFLQMDSLRPEDTGVYFCARPQVHYDYNGFPYWGQGTPVTVSSGGGGSGGGGSGGGGSAQDIQMTQSPSSLSASVGDRVTMTCSASSSVSYMNWYQQKPGKAPKRWIYDSSKLASGVPARFSGSGSGTDYTLTISSLQPEDFATYYCQQWSRNPPTFGGGTKLQITRTEPKSCDKTHTCPPCPDQDTAIRVFAIPPSFASIFLTKSTKLTCLVTDLTTYDSVTISWTRQNGEAVKTHTNISESHPNATFSAVGEASICEDDWNSGERFTCTVTHTDLPSPLKQTISRPKGQPREPQVYTLPPSRDELTKNQVSLTCLVKGFYPSDIAVEWESNGQPENNYKTTPPVLDSDGSFFLYSKLTVDKSRWQQGNVFSCSVMHEALHNHYTQKSLSLSPGKTGLNDIFEAQKIEWHEDYKDDDDKDYKDDDDKDYKDDDDKHHHHHH

SEQ ID NO: 295 - protein, 478 aa, Artificial Sequence
  HuCris7-(VH3-VL2) IgG1-N297A (No leader)
QVQLVQSGGGVVQPGRSLRLSCKASGYTFTRSTMHWVRQAPGKGLEWIGYINPSSAYTNYNQKFKDRFTISADKSKSTAFLQMDSLRPEDTGVYFCARPQVHYDYNGFPYWGQGTPVTVSSGGGGSGGGGSGGGGSAQDIQMTQSPSSLSASVGDRVTITCSASSSVSYMNWYQQTPGKAPKRWIYDSSKLASGVPSRFSGSGSGTDFTLTISSLQPEDIATYYCQQWSRNPPTFGQGTKLQITRTEPKSSDKTHTCPPCPAPELLGGPSVFLFPPKPKDTLMISRTPEVTCVVVDVSHEDPEVKFNWYVDGVEVHNAKTKPREEQYASTYRVVSVLTVLHQDWLNGKEYKCKVSNKALPAPIEKTISKAKGQPREPQVYTLPPSRDELTKNQVSLTCLVKGFYPSDIAVEWESNGQPENNYKTTPPVLDSDGSFFLYSKLTVDKSRWQQGNVFSCSVMHEALHNHYTQKSLSLSPGK

SEQ ID NO: 296 - protein, 477 aa, Artificial Sequence
  HuCris7-(VH3-VL2) IgG1-AA-N297A (No leader)
QVQLVQSGGGVVQPGRSLRLSCKASGYTFTRSTMHWVRQAPGKGLEWIGYINPSSAYTNYNQKFKDRFTISADKSKSTAFLQMDSLRPEDTGVYFCARPQVHYDYNGFPYWGQGTPVTVSSGGGGSGGGGSGGGGSAQDIQMTQSPSSLSASVGDRVTITCSASSSVSYMNWYQQTPGKAPKRWIYDSSKLASGVPSRFSGSGSGTDFTLTISSLQPEDIATYYCQQWSRNPPTFGQGTKLQITRTEPKSSDKTHTCPPCPAPEAAAPSVFLFPPKPKDTLMISRTPEVTCVVVDVSHEDPEVKFNWYVDGVEVHNAKTKPREEQYASTYRVVSVLTVLHQDWLNGKEYKCKVSNKALPAPIEKTISKAKGQPREPQVYTLPPSRDELTKNQVSLTCLVKGFYPSDIAVEWESNGQPENNYKTTPPVLDSDGSFFLYSKLTVDKSRWQQGNVFSCSVMHEALHNHYTQKSLSLSPGK

SEQ ID NO: 297 - protein, 477 aa, Artificial Sequence
  HuCris7-(VH3-VL2) IgG2-AA-N297A (No leader)
QVQLVQSGGGVVQPGRSLRLSCKASGYTFTRSTMHWVRQAPGKGLEWIGYINPSSAYTNYNQKFKDRFTISADKSKSTAFLQMDSLRPEDTGVYFCARPQVHYDYNGFPYWGQGTPVTVSSGGGGSGGGGSGGGGSAQDIQMTQSPSSLSASVGDRVTITCSASSSVSYMNWYQQTPGKAPKRWIYDSSKLASGVPSRFSGSGSGTDFTLTISSLQPEDIATYYCQQWSRNPPTFGQGTKLQITRTEPKSSDKTHTCPPCPAPEAAAPSVFLFPPKPKDTLMISRTPEVTCVVVDVSHEDPEVQFNWYVDGMEVHNAKTKPREEQFASTFRVVSVLTVVHQDWLNGKEYKCKVSNKGLPAPIEKTISKTKGQPREPQVYTLPPSREEMTKNQVSLTCLVKGFYPSDIAVEWESNGQPENNYKTTPPMLDSDGSFFLYSKLTVDKSRWQQGNVFSCSVMHEALHNHYTQKSLSLSPGK

SEQ ID NO: 298 - protein, 477 aa, Artificial Sequence
  HuCris7-(VH3-VL2) IgG4-AA-N297A (No leader)
QVQLVQSGGGVVQPGRSLRLSCKASGYTFTRSTMHWVRQAPGKGLEWIGYINPSSAYTNYNQKFKDRFTISADKSKSTAFLQMDSLRPEDTGVYFCARPQVHYDYNGFPYWGQGTPVTVSSGGGGSGGGGSGGGGSAQDIQMTQSPSSLSASVGDRVTITCSASSSVSYMNWYQQTPGKAPKRWIYDSSKLASGVPSRFSGSGSGTDFTLTISSLQPEDIATYYCQQWSRNPPTFGQGTKLQITRTEPKSSDKTHTCPPCPAPEAAAPSVFLFPPKPKDTLMISRTPEVTCVVVDVSQEDPEVQFNWYVDGVEVHNAKTKPREEQFASTYRVVSVLTVLHQDWLNGKEYKCKVSNKGLPSSIEKTISKAKGQPREPQVYTLPPSQEEMTKNQVSLTCLVKGFYPSDIAVEWESNGQPENNYKTTPPVLDSDGSFFLYSRLTVDKSRWQEGNVFSCSVMHEALHNHYTQKSLSLSPGK

SEQ ID NO: 299 - protein, 520 aa, Artificial Sequence
  HuCris7-(VH3-VL2) HM1 (No leader)
QVQLVQSGGGVVQPGRSLRLSCKASGYTFTRSTMHWVRQAPGKGLEWIGYINPSSAYTNYNQKFKDRFTISADKSKSTAFLQMDSLRPEDTGVYFCARPQVHYDYNGFPYWGQGTPVTVSSGGGGSGGGGSGGGGSAQDIQMTQSPSSLSASVGDRVTITCSASSSVSYMNWYQQTPGKAPKRWIYDSSKLASGVPSRFSGSGSGTDFTLTISSLQPEDIATYYCQQWSRNPPTFGQGTKLQITRTEPKSCDKTHTCPPCPDQDTAIRVFAIPPSFASIFLTKSTKLTCLVTDLTTYDSVTISWTRQNGEAVKTHTNISESHPNATFSAVGEASICEDDWNSGERFTCTVTHTDLPSPLKQTISRPKGQPREPQVYTLPPSRDELTKNQVSLTCLVKGFYPSDIAVEWESNGQPENNYKTTPPVLDSDGSFFLYSKLTVDKSRWQQGNVFSCSVMHEALHNHYTQKSLSLSPGKTGLNDIFEAQKIEWHEDYKDDDDKDYKDDDDKDYKDDDDKHHHHHH

SEQ ID NO: 300 - protein, 16 aa, Artificial Sequence
  Linker 121
TEPKSSDKTHTCPPCP

SEQ ID NO: 301 - protein, 110 aa, Artificial Sequence
  Linker 123
SRDFTPPTVKILQSSSDGGGHFPPTIQLLCLVSGYTPGTINITWLEDGQVMDVDLSTASTTQEGELASTQSELTLSQKHWLSDRTYTCQVTYQGHTFEDSTKKSACPPCP

SEQ ID NO: 302 - protein, 50 aa, Artificial Sequence
  Linker 124
QEKEAIERLKAAGAPESLVIQAYFASEKNENLAANFLLSQNFDDECPPCP

SEQ ID NO: 303 - DNA, 1615 bp, Artificial Sequence
  Nucleotide sequence encoding H57 Half null SMIP with human 2H7 leader sequence
aagcttgccgccatggattttcaagtgcagattttcagcttcctgctaatcagtgcttcagtcataatgtcgcgaggagaagtttacctggtggagtcagggggagatttagtgcagcctggaagttccctgaaagtctcctgtgcagcctctggattcaccttcagtgacttctggatgtactgggtccgccaggctccagggaaggggctggagtgggttggtagaattaaaaacaaacctaataattatgcaacagaatatgcggattccgtgagaggcagattcaccatctcaagagacgactcaagaaacagcatctatctgcaaatgaataggttaagagtcgatgacacagccatttattactgtactagagccgggaggttcgaccacttcgattactggggccaaggaaccatggtcaccgtctcaagcggtggcggagggtctgggggtggcggatccggaggtggtggctctgcacaatatgagctgatccaaccatcttcagcatcagtcactgtaggagagacggtcaaaatcacttgctctggggaccagttgccaaaaaattttgcttattggtttcagcaaaagtcagacaagaacattttactactcatatacatggataataagcgaccatcagggatcccagaacgattctctgggtccacttcaggtacaacagccaccttgaccatcagtggagcccagcctgaggatgaggctgcctattactgtttgtcttcatatggtgataataacgatttagtttttggcagcggaacccagctcaccgtcctacgaactgagcccagagtgcccataacacagaacccctgtcctccactcaaagagtgtcccccatgcgcagctccagacgcagcgggtgcgccatccgtcttcatcttccctccaaagatcaaggatgtactcatgatctccctgagccccatggtcacatgtgtggtggtggatgtgagcgaggatgacccagacgtccagatcagctggtttgtgaacaacgtggaagtacacacagctcagacacaaacccatagagaggattacgccagtactctccgggtggtcagtgccctccccatccagcaccaggactggatgagtggcaaggagttcaaatgcaaggtcaacaacagagccctcccatcccccatcgagaaaaccatctcaaaacccagagggccagtaagagctccacaggtatatgtcttgcctccaccagcagaagagatgactaagaaagagttcagtctgacctgcatgatcacaggcttcttacctgccgaaattgctgtggactggaccagcaatgggcgtacagagcaaaactacaagaacaccgcaacagtcctggactctgatggttcttacttcatgtacagcaagctcagagtacaaaagagcacttgggaaagaggaagtcttttcgcctgctcagtggtccacgagggtctgcacaatcaccttacgactaagaccatctcccggtctctgggtaaatgagctcagcacacacaatgctcctgggtcgaccgccggcgaagggcaagggcgaattcgcccttagctcggcctcgagtctaga

SEQ ID NO: 304 - protein, 506 aa, Artificial Sequence
  H57 Half null SMIP amino acid sequence with human 2H7 leader sequence
MDFQVQIFSFLLISASVIMSRGEVYLVESGGDLVQPGSSLKVSCAASGFTFSDFWMYWVRQAPGKGLEWVGRIKNKPNNYATEYADSVRGRFTISRDDSRNSIYLQMNRLRVDDTAIYYCTRAGRFDHFDYWGQGTMVTVSSGGGGSGGGGSGGGGSAQYELIQPSSASVTVGETVKITCSGDQLPKNFAYWFQQKSDKNILLLIYMDNKRPSGIPERFSGSTSGTTATLTISGAQPEDEAAYYCLSSYGDNNDLVFGSGTQLTVLRTEPRVPITQNPCPPLKECPPCAAPDAAGAPSVFIFPPKIKDVLMISLSPMVTCVVVDVSEDDPDVQISWFVNNVEVHTAQTQTHREDYASTLRVVSALPIQHQDWMSGKEFKCKVNNRALPSPIEKTISKPRGPVRAPQVYVLPPPAEEMTKKEFSLTCMITGFLPAEIAVDWTSNGRTEQNYKNTATVLDSDGSYFMYSKLRVQKSTWERGSLFACSVVHEGLHNHLTTKTISRSLGK

SEQ ID NO: 305 - DNA, 1669 bp, Artificial Sequence
  Nucleotide sequence encoding H57-HM2 SMIP with human 2H7 leader sequence
aagcttgccgccatggattttcaagtgcagattttcagcttcctgctaatcagtgcttcagtcataatgtcgcgaggagaagtttacctggtggagtcagggggagatttagtgcagcctggaagttccctgaaagtctcctgtgcagcctctggattcaccttcagtgacttctggatgtactgggtccgccaggctccagggaaggggctggagtgggttggtagaattaaaaacaaacctaataattatgcaacagaatatgcggattccgtgagaggcagattcaccatctcaagagacgactcaagaaacagcatctatctgcaaatgaataggttaagagtcgatgacacagccatttattactgtactagagccgggaggttcgaccacttcgattactggggccaaggaaccatggtcaccgtctcaagcggtggcggagggtctgggggtggcggatccggaggtggtggctctgcacaatatgagctgatccaaccatcttcagcatcagtcactgtaggagagacggtcaaaatcacttgctctggggaccagttgccaaaaaattttgcttattggtttcagcaaaagtcagacaagaacattttactactcatatacatggataataagcgaccatcagggatcccagaacgattctctgggtccacttcaggtacaacagccaccttgaccatcagtggagcccagcctgaggatgaggctgcctattactgtttgtcttcatatggtgataataacgatttagtttttggcagcggaacccagctaaccgtcctacgaactgagcccagagtgcccataacacagaacccctgtcctccactcaaagagtgtcccccatgcgcagctagtccctccacagacatcctaaccttcaccatccccccctcctttgccgacatcttcctcagcaagtccgctaacctgacctgtctggtctcaaacctggcaacctatgaaaccctgaatatctcctgggcttctcaaagtggtgaaccactggaaaccaaaattaaaatcatggaaagccatcccaatggcaccttcagtgctaagggtgtggctagtgtttgtgtggaagactggaataacaggaaggaatttgtgtgtactgtgactcacagggatctgccttcaccacagaagaaattcatctcaaaacccaatgggccagtaagagctccacaggtatatgtcttgcctccaccagcagaagagatgactaagaaagagttcagtctgacctgcatgatcacaggcttcttacctgccgaaattgctgtggactggaccagcaatgggcgtacagagcaaaactacaagaacaccgcaacagtcctggactctgatggttcttacttcatgtacagcaagctcagagtacaaaagagcacttgggaaagaggaagtcttttcgcctgctcagtggtccacgagggtctgcacaatcaccttacgactaagaccatctcccggtctctgggtaaaaccggtctgaacgacatcttcgaggctcagaaaatcgaatggcacgaagattacaaggatgacgacgataaggattacaaggatgacgacgataaggattacaaggatgacgacgataagcatcatcatcatcatcactgactctaga

SEQ ID NO: 306 - protein, 549 aa, Artificial Sequence
  H57-HM2 SMIP amino acid sequence with human 2H7 leader sequence
MDFQVQIFSFLLISASVIMSRGEVYLVESGGDLVQPGSSLKVSCAASGFTFSDFWMYWVRQAPGKGLEWVGRIKNKPNNYATEYADSVRGRFTISRDDSRNSIYLQMNRLRVDDTAIYYCTRAGRFDHFDYWGQGTMVTVSSGGGGSGGGGSGGGGSAQYELIQPSSASVTVGETVKITCSGDQLPKNFAYWFQQKSDKNILLLIYMDNKRPSGIPERFSGSTSGTTATLTISGAQPEDEAAYYCLSSYGDNNDLVFGSGTQLTVLRTEPRVPITQNPCPPLKECPPCAASPSTDILTFTIPPSFADIFLSKSANLTCLVSNLATYETLNISWASQSGEPLETKIKIMESHPNGTFSAKGVASVCVEDWNNRKEFVCTVTHRDLPSPQKKFISKPNGPVRAPQVYVLPPPAEEMTKKEFSLTCMITGFLPAEIAVDWTSNGRTEQNYKNTATVLDSDGSYFMYSKLRVQKSTWERGSLFACSVVHEGLHNHLTTKTISRSLGKTGLNDIFEAQKIEWHEDYKDDDDKDYKDDDDKDYKDDDDKHHHHHH

SEQ ID NO: 307 - protein, 216 aa, Artificial Sequence
  Half null CH2-CH3 regions
PDAAGAPSVFIFPPKIKDVLMISLSPMVTCVVVDVSEDDPDVQISWFVNNVEVHTAQTQTHREDYASTLRVVSALPIQHQDWMSGKEFKCKVNNRALPSPIEKTISKPRGPVRAPQVYVLPPPAEEMTKKEFSLTCMITGFLPAEIAVDWTSNGRTEQNYKNTATVLDSDGSYFMYSKLRVQKSTWERGSLFACSVVHEGLHNHLTTKTISRSLGK

SEQ ID NO: 308 - protein, 259 aa, Artificial Sequence
  HM2 (mouse CH3mu-CH3gamma) with C-termial tail
SPSTDILTFTIPPSFADIFLSKSANLTCLVSNLATYETLNISWASQSGEPLETKIKIMESHPNGTFSAKGVASVCVEDWNNRKEFVCTVTHRDLPSPQKKFISKPNGPVRAPQVYVLPPPAEEMTKKEFSLTCMITGFLPAEIAVDWTSNGRTEQNYKNTATVLDSDGSYFMYSKLRVQKSTWERGSLFACSVVHEGLHNHLTTKTISRSLGKTGLNDIFEAQKIEWHEDYKDDDDKDYKDDDDKDYKDDDDKHHHHHH

SEQ ID NO: 309 - protein, 213 aa, Artificial Sequence
  HM2 (mouse CH3mu-CH3gamma) without C-termial tail
SPSTDILTFTIPPSFADIFLSKSANLTCLVSNLATYETLNISWASQSGEPLETKIKIMESHPNGTFSAKGVASVCVEDWNNRKEFVCTVTHRDLPSPQKKFISKPNGPVRAPQVYVLPPPAEEMTKKEFSLTCMITGFLPAEIAVDWTSNGRTEQNYKNTATVLDSDGSYFMYSKLRVQKSTWERGSLFACSVVHEGLHNHLTTKTISRSLGK

SEQ ID NO: 310 - DNA, 1446 bp, Artificial Sequence
  Nucleotide sequence encloding BC3 G1 N297A with IgG1 SCC-P hinge and RSS junction amino acids
caggtccagctgcagcagtctgcagctgaactggcaagacctggggcctcagtgaagatgtcctgcaaggcttctggctacacctttactaggtacacgatgcagtgggtaaaacagaggcctggacagggtctggaatggattggatacattaatcctagtagtggatatattgggtacagtcagaagttcaaggacaagaccacattgactgcagacaaatcctccagcacagcctacatgcaactgagcagtctgacatctgaggactctgcggtctattactgtgcaagatcgaaggtctactatgattacgacgtttattctatggactactggggtcaaggaacctcggtcaccgtctcaagcggtggcggagggtctgggggtggcggatccggaggtggtggctctgcacaacaaattattctcacccagtctccagcaatcatgtctgcatctccaggggagaaggtcaccatgacctgcagtgccagctcaagtgtaagttacatgcactggtaccagcagaagtcaggcacctcccccaaaagatggatttatgacacatccaaactggcttctggcgtccctgctcgcttcagtggcagtgggtctgggacctcttactctctcacaatcagcagcatggaggctgaagatgctgccacttattactgccagcagtggagtagtaatccactcacgttcggtgctgggaccaagctggagctgaaacgctcgagcgagcccaaatcttctgacaaaactcacacatgcccaccgtgcccagcacctgaactcctgggtggaccgtcagtcttcctcttccccccaaaacccaaggacaccctcatgatctcccggacccctgaggtcacatgcgtggtggtggacgtgagccacgaagaccctgaggtcaagttcaactggtacgtggacggcgtggaggtgcataatgccaagacaaagccgcgggaggagcagtacgccagcacgtaccgtgtggtcagcgtcctcaccgtcctgcaccaggactggctgaatggcaaggagtacaagtgcaaggtctccaacaaagccctcccagcccccatcgagaaaaccatctccaaagccaaagggcagccccgagaaccacaggtgtacaccctgcccccatcccgggatgagctgaccaagaaccaggtcagcctgacctgcctggtcaaaggcttctatccaagcgacatcgccgtggagtgggagagcaatgggcagccggagaacaactacaagaccacgcctcccgtgctggactccgacggctccttcttcctctacagcaagctcaccgtggacaagagccggtggcagcaggggaacgtcttctcatgctccgtgatgcatgaggctctgcacaaccactacacgcagaagagcctctccctgtctccgggtaaatga

SEQ ID NO: 311 - protein, 481 aa, Artificial Sequence
  BC3 G1 N297A with IgG1 SCC-P hinge and RSS junction amino acids
QVQLQQSAAELARPGASVKMSCKASGYTFTRYTMQWVKQRPGQGLEWIGYINPSSGYIGYSQKFKDKTTLTADKSSSTAYMQLSSLTSEDSAVYYCARSKVYYDYDVYSMDYWGQGTSVTVSSGGGGSGGGGSGGGGSAQQIILTQSPAIMSASPGEKVTMTCSASSSVSYMHWYQQKSGTSPKRWIYDTSKLASGVPARFSGSGSGTSYSLTISSMEAEDAATYYCQQWSSNPLTFGAGTKLELKRSSEPKSSDKTHTCPPCPAPELLGGPSVFLFPPKPKDTLMISRTPEVTCVVVDVSHEDPEVKFNWYVDGVEVHNAKTKPREEQYASTYRVVSVLTVLHQDWLNGKEYKCKVSNKALPAPIEKTISKAKGQPREPQVYTLPPSRDELTKNQVSLTCLVKGFYPSDIAVEWESNGQPENNYKTTPPVLDSDGSFFLYSKLTVDKSRWQQGNVFSCSVMHEALHNHYTQKSLSLSPGK

SEQ ID NO: 312 - DNA, 1470 bp, Artificial Sequence
  Nucleotide sequence encoding BC3 G1 N297A with hinge derived from IgA1 and RSS junction amino acids
caggtccagctgcagcagtctgcagctgaactggcaagacctggggcctcagtgaagatgtcctgcaaggcttctggctacacctttactaggtacacgatgcagtgggtaaaacagaggcctggacagggtctggaatggattggatacattaatcctagtagtggatatattgggtacagtcagaagttcaaggacaagaccacattgactgcagacaaatcctccagcacagcctacatgcaactgagcagtctgacatctgaggactctgcggtctattactgtgcaagatcgaaggtctactatgattacgacgtttattctatggactactggggtcaaggaacctcggtcaccgtctcaagcggtggcggagggtctgggggtggcggatccggaggtggtggctctgcacaacaaattattctcacccagtctccagcaatcatgtctgcatctccaggggagaaggtcaccatgacctgcagtgccagctcaagtgtaagttacatgcactggtaccagcagaagtcaggcacctcccccaaaagatggatttatgacacatccaaactggcttctggcgtccctgctcgcttcagtggcagtgggtctgggacctcttactctctcacaatcagcagcatggaggctgaagatgctgccacttattactgccagcagtggagtagtaatccactcacgttcggtgctgggaccaagctggagctgaaacgctcgagcccctcaactccacctaccccatctccctcaactccacctaccccatctccctcatgcccaccgtgcccagcacctgaactcctgggtggaccgtcagtcttcctcttccccccaaaacccaaggacaccctcatgatctcccggacccctgaggtcacatgcgtggtggtggacgtgagccacgaagaccctgaggtcaagttcaactggtacgtggacggcgtggaggtgcataatgccaagacaaagccgcgggaggagcagtacgccagcacgtaccgtgtggtcagcgtcctcaccgtcctgcaccaggactggctgaatggcaaggagtacaagtgcaaggtctccaacaaagccctcccagcccccatcgagaaaaccatctccaaagccaaagggcagccccgagaaccacaggtgtacaccctgcccccatcccgggatgagctgaccaagaaccaggtcagcctgacctgcctggtcaaaggcttctatccaagcgacatcgccgtggagtgggagagcaatgggcagccggagaacaactacaagaccacgcctcccgtgctggactccgacggctccttcttcctctacagcaagctcaccgtggacaagagccggtggcagcaggggaacgtcttctcatgctccgtgatgcatgaggctctgcacaaccactacacgcagaagagcctctccctgtctccgggtaaatga

SEQ ID NO: 313 - protein, 489 aa, Artificial Sequence
  BC3 G1 N297A with hinge derived from IgA1 and RSS junction amino acids
QVQLQQSAAELARPGASVKMSCKASGYTFTRYTMQWVKQRPGQGLEWIGYINPSSGYIGYSQKFKDKTTLTADKSSSTAYMQLSSLTSEDSAVYYCARSKVYYDYDVYSMDYWGQGTSVTVSSGGGGSGGGGSGGGGSAQQIILTQSPAIMSASPGEKVTMTCSASSSVSYMHWYQQKSGTSPKRWIYDTSKLASGVPARFSGSGSGTSYSLTISSMEAEDAATYYCQQWSSNPLTFGAGTKLELKRSSPSTPPTPSPSTPPTPSPSCPPCPAPELLGGPSVFLFPPKPKDTLMISRTPEVTCVVVDVSHEDPEVKFNWYVDGVEVHNAKTKPREEQYASTYRVVSVLTVLHQDWLNGKEYKCKVSNKALPAPIEKTISKAKGQPREPQVYTLPPSRDELTKNQVSLTCLVKGFYPSDIAVEWESNGQPENNYKTTPPVLDSDGSFFLYSKLTVDKSRWQQGNVFSCSVMHEALHNHYTQKSLSLSPGK

SEQ ID NO: 314 - DNA, 1431 bp, Artificial Sequence
  Nucleotide sequence encoding BC3 G1 N297A with hinge derived from IgA2 and RSS junction amino acids
caggtccagctgcagcagtctgcagctgaactggcaagacctggggcctcagtgaagatgtcctgcaaggcttctggctacacctttactaggtacacgatgcagtgggtaaaacagaggcctggacagggtctggaatggattggatacattaatcctagtagtggatatattgggtacagtcagaagttcaaggacaagaccacattgactgcagacaaatcctccagcacagcctacatgcaactgagcagtctgacatctgaggactctgcggtctattactgtgcaagatcgaaggtctactatgattacgacgtttattctatggactactggggtcaaggaacctcggtcaccgtctcaagcggtggcggagggtctgggggtggcggatccggaggtggtggctctgcacaacaaattattctcacccagtctccagcaatcatgtctgcatctccaggggagaaggtcaccatgacctgcagtgccagctcaagtgtaagttacatgcactggtaccagcagaagtcaggcacctcccccaaaagatggatttatgacacatccaaactggcttctggcgtccctgctcgcttcagtggcagtgggtctgggacctcttactctctcacaatcagcagcatggaggctgaagatgctgccacttattactgccagcagtggagtagtaatccactcacgttcggtgctgggaccaagctggagctgaaacgctcgagccccccacctcccccatgcccaccgtgcccagcacctgaactcctgggtggaccgtcagtcttcctcttccccccaaaacccaaggacaccctcatgatctcccggacccctgaggtcacatgcgtggtggtggacgtgagccacgaagaccctgaggtcaagttcaactggtacgtggacggcgtggaggtgcataatgccaagacaaagccgcgggaggagcagtacgccagcacgtaccgtgtggtcagcgtcctcaccgtcctgcaccaggactggctgaatggcaaggagtacaagtgcaaggtctccaacaaagccctcccagcccccatcgagaaaaccatctccaaagccaaagggcagccccgagaaccacaggtgtacaccctgcccccatcccgggatgagctgaccaagaaccaggtcagcctgacctgcctggtcaaaggcttctatccaagcgacatcgccgtggagtgggagagcaatgggcagccggagaacaactacaagaccacgcctcccgtgctggactccgacggctccttcttcctctacagcaagctcaccgtggacaagagccggtggcagcaggggaacgtcttctcatgctccgtgatgcatgaggctctgcacaaccactacacgcagaagagcctctccctgtctccgggtaaatga

SEQ ID NO: 315 - protein, 476 aa, Artificial Sequence
  BC3 G1 N297A with hinge derived from IgA2 and RSS junction amino acids
QVQLQQSAAELARPGASVKMSCKASGYTFTRYTMQWVKQRPGQGLEWIGYINPSSGYIGYSQKFKDKTTLTADKSSSTAYMQLSSLTSEDSAVYYCARSKVYYDYDVYSMDYWGQGTSVTVSSGGGGSGGGGSGGGGSAQQIILTQSPAIMSASPGEKVTMTCSASSSVSYMHWYQQKSGTSPKRWIYDTSKLASGVPARFSGSGSGTSYSLTISSMEAEDAATYYCQQWSSNPLTFGAGTKLELKRSSPPPPPCPPCPAPELLGGPSVFLFPPKPKDTLMISRTPEVTCVVVDVSHEDPEVKFNWYVDGVEVHNAKTKPREEQYASTYRVVSVLTVLHQDWLNGKEYKCKVSNKALPAPIEKTISKAKGQPREPQVYTLPPSRDELTKNQVSLTCLVKGFYPSDIAVEWESNGQPENNYKTTPPVLDSDGSFFLYSKLTVDKSRWQQGNVFSCSVMHEALHNHYTQKSLSLSPGK

SEQ ID NO: 316 - DNA, 1461 bp, Artificial Sequence
  Nucleotide sequence encoding BC3 G1 N297A with IgG3 mini hinge and RSS junction amino acids
caggtccagctgcagcagtctgcagctgaactggcaagacctggggcctcagtgaagatgtcctgcaaggcttctggctacacctttactaggtacacgatgcagtgggtaaaacagaggcctggacagggtctggaatggattggatacattaatcctagtagtggatatattgggtacagtcagaagttcaaggacaagaccacattgactgcagacaaatcctccagcacagcctacatgcaactgagcagtctgacatctgaggactctgcggtctattactgtgcaagatcgaaggtctactatgattacgacgtttattctatggactactggggtcaaggaacctcggtcaccgtctcaagcggtggcggagggtctgggggtggcggatccggaggtggtggctctgcacaacaaattattctcacccagtctccagcaatcatgtctgcatctccaggggagaaggtcaccatgacctgcagtgccagctcaagtgtaagttacatgcactggtaccagcagaagtcaggcacctcccccaaaagatggatttatgacacatccaaactggcttctggcgtccctgctcgcttcagtggcagtgggtctgggacctcttactctctcacaatcagcagcatggaggctgaagatgctgccacttattactgccagcagtggagtagtaatccactcacgttcggtgctgggaccaagctggagctgaaacgctcgagcgagcccaaatctagcgacacacctcccccaagcccacggtccccatgcccaccgtgcccagcacctgaactcctgggtggaccgtcagtcttcctcttccccccaaaacccaaggacaccctcatgatctcccggacccctgaggtcacatgcgtggtggtggacgtgagccacgaagaccctgaggtcaagttcaactggtacgtggacggcgtggaggtgcataatgccaagacaaagccgcgggaggagcagtacgccagcacgtaccgtgtggtcagcgtcctcaccgtcctgcaccaggactggctgaatggcaaggagtacaagtgcaaggtctccaacaaagccctcccagcccccatcgagaaaaccatctccaaagccaaagggcagccccgagaaccacaggtgtacaccctgcccccatcccgggatgagctgaccaagaaccaggtcagcctgacctgcctggtcaaaggcttctatccaagcgacatcgccgtggagtgggagagcaatgggcagccggagaacaactacaagaccacgcctcccgtgctggactccgacggctccttcttcctctacagcaagctcaccgtggacaagagccggtggcagcaggggaacgtcttctcatgctccgtgatgcatgaggctctgcacaaccactacacgcagaagagcctctccctgtctccgggtaaatga

SEQ ID NO: 317 - protein, 486 aa, Artificial Sequence
  BC3 G1 N297A with IgG3 mini hinge and RSS junction amino acids
QVQLQQSAAELARPGASVKMSCKASGYTFTRYTMQWVKQRPGQGLEWIGYINPSSGYIGYSQKFKDKTTLTADKSSSTAYMQLSSLTSEDSAVYYCARSKVYYDYDVYSMDYWGQGTSVTVSSGGGGSGGGGSGGGGSAQQIILTQSPAIMSASPGEKVTMTCSASSSVSYMHWYQQKSGTSPKRWIYDTSKLASGVPARFSGSGSGTSYSLTISSMEAEDAATYYCQQWSSNPLTFGAGTKLELKRSSEPKSSDTPPPSPRSPCPPCPAPELLGGPSVFLFPPKPKDTLMISRTPEVTCVVVDVSHEDPEVKFNWYVDGVEVHNAKTKPREEQYASTYRVVSVLTVLHQDWLNGKEYKCKVSNKALPAPIEKTISKAKGQPREPQVYTLPPSRDELTKNQVSLTCLVKGFYPSDIAVEWESNGQPENNYKTTPPVLDSDGSFFLYSKLTVDKSRWQQGNVFSCSVMHEALHNHYTQKSLSLSPGK

SEQ ID NO: 318 - DNA, 1518 bp, Artificial Sequence
  Nucleotide sequence encoding BC3 G1 N297A with a hinge derived from IgD and RSS junction amino acids
caggtccagctgcagcagtctgcagctgaactggcaagacctggggcctcagtgaagatgtcctgcaaggcttctggctacacctttactaggtacacgatgcagtgggtaaaacagaggcctggacagggtctggaatggattggatacattaatcctagtagtggatatattgggtacagtcagaagttcaaggacaagaccacattgactgcagacaaatcctccagcacagcctacatgcaactgagcagtctgacatctgaggactctgcggtctattactgtgcaagatcgaaggtctactatgattacgacgtttattctatggactactggggtcaaggaacctcggtcaccgtctcaagcggtggcggagggtctgggggtggcggatccggaggtggtggctctgcacaacaaattattctcacccagtctccagcaatcatgtctgcatctccaggggagaaggtcaccatgacctgcagtgccagctcaagtgtaagttacatgcactggtaccagcagaagtcaggcacctcccccaaaagatggatttatgacacatccaaactggcttctggcgtccctgctcgcttcagtggcagtgggtctgggacctcttactctctcacaatcagcagcatggaggctgaagatgctgccacttattactgccagcagtggagtagtaatccactcacgttcggtgctgggaccaagctggagctgaaacgctcgagcgagtctccaaaggcacaggcctcctccgtgcccactgcacaaccccaagcagagggcagcctcgccaaggcaaccacagccccagccaccacccgtaacacatgcccaccgtgcccagcacctgaactcctgggtggaccgtcagtcttcctcttccccccaaaacccaaggacaccctcatgatctcccggacccctgaggtcacatgcgtggtggtggacgtgagccacgaagaccctgaggtcaagttcaactggtacgtggacggcgtggaggtgcataatgccaagacaaagccgcgggaggagcagtacgccagcacgtaccgtgtggtcagcgtcctcaccgtcctgcaccaggactggctgaatggcaaggagtacaagtgcaaggtctccaacaaagccctcccagcccccatcgagaaaaccatctccaaagccaaagggcagccccgagaaccacaggtgtacaccctgcccccatcccgggatgagctgaccaagaaccaggtcagcctgacctgcctggtcaaaggcttctatccaagcgacatcgccgtggagtgggagagcaatgggcagccggagaacaactacaagaccacgcctcccgtgctggactccgacggctccttcttcctctacagcaagctcaccgtggacaagagccggtggcagcaggggaacgtcttctcatgctccgtgatgcatgaggctctgcacaaccactacacgcagaagagcctctccctgtctccgggtaaatga

SEQ ID NO: 319 - protein, 505 aa, Artificial Sequence
  BC3 G1 N297A with a hinge derived from IgD and RSS junction amino acids
QVQLQQSAAELARPGASVKMSCKASGYTFTRYTMQWVKQRPGQGLEWIGYINPSSGYIGYSQKFKDKTTLTADKSSSTAYMQLSSLTSEDSAVYYCARSKVYYDYDVYSMDYWGQGTSVTVSSGGGGSGGGGSGGGGSAQQIILTQSPAIMSASPGEKVTMTCSASSSVSYMHWYQQKSGTSPKRWIYDTSKLASGVPARFSGSGSGTSYSLTISSMEAEDAATYYCQQWSSNPLTFGAGTKLELKRSSESPKAQASSVPTAQPQAEGSLAKATTAPATTRNTCPPCPAPELLGGPSVFLFPPKPKDTLMISRTPEVTCVVVDVSHEDPEVKFNWYVDGVEVHNAKTKPREEQYASTYRVVSVLTVLHQDWLNGKEYKCKVSNKALPAPIEKTISKAKGQPREPQVYTLPPSRDELTKNQVSLTCLVKGFYPSDIAVEWESNGQPENNYKTTPPVLDSDGSFFLYSKLTVDKSRWQQGNVFSCSVMHEALHNHYTQKSLSLSPGK

SEQ ID NO: 320 - DNA, 1461 bp, Artificial Sequence
  Nucleotide sequence encoding BC3 G1 N297A with a hinge derived from IgG and RSS junction amino acids
caggtccagctgcagcagtctgcagctgaactggcaagacctggggcctcagtgaagatgtcctgcaaggcttctggctacacctttactaggtacacgatgcagtgggtaaaacagaggcctggacagggtctggaatggattggatacattaatcctagtagtggatatattgggtacagtcagaagttcaaggacaagaccacattgactgcagacaaatcctccagcacagcctacatgcaactgagcagtctgacatctgaggactctgcggtctattactgtgcaagatcgaaggtctactatgattacgacgtttattctatggactactggggtcaaggaacctcggtcaccgtctcaagcggtggcggagggtctgggggtggcggatccggaggtggtggctctgcacaacaaattattctcacccagtctccagcaatcatgtctgcatctccaggggagaaggtcaccatgacctgcagtgccagctcaagtgtaagttacatgcactggtaccagcagaagtcaggcacctcccccaaaagatggatttatgacacatccaaactggcttctggcgtccctgctcgcttcagtggcagtgggtctgggacctcttactctctcacaatcagcagcatggaggctgaagatgctgccacttattactgccagcagtggagtagtaatccactcacgttcggtgctgggaccaagctggagctgaaacgctcgagcgagcccaaatcttctgacaaaactcacacaagcccaccgagcccatgcccaccgtgcccagcacctgaactcctgggtggaccgtcagtcttcctcttccccccaaaacccaaggacaccctcatgatctcccggacccctgaggtcacatgcgtggtggtggacgtgagccacgaagaccctgaggtcaagttcaactggtacgtggacggcgtggaggtgcataatgccaagacaaagccgcgggaggagcagtacgccagcacgtaccgtgtggtcagcgtcctcaccgtcctgcaccaggactggctgaatggcaaggagtacaagtgcaaggtctccaacaaagccctcccagcccccatcgagaaaaccatctccaaagccaaagggcagccccgagaaccacaggtgtacaccctgcccccatcccgggatgagctgaccaagaaccaggtcagcctgacctgcctggtcaaaggcttctatccaagcgacatcgccgtggagtgggagagcaatgggcagccggagaacaactacaagaccacgcctcccgtgctggactccgacggctccttcttcctctacagcaagctcaccgtggacaagagccggtggcagcaggggaacgtcttctcatgctccgtgatgcatgaggctctgcacaaccactacacgcagaagagcctctccctgtctccgggtaaatga

SEQ ID NO: 321 - protein, 486 aa, Artificial Sequence
  BC3 G1 N297A with a hinge derived from IgG and RSS junction amino acids
QVQLQQSAAELARPGASVKMSCKASGYTFTRYTMQWVKQRPGQGLEWIGYINPSSGYIGYSQKFKDKTTLTADKSSSTAYMQLSSLTSEDSAVYYCARSKVYYDYDVYSMDYWGQGTSVTVSSGGGGSGGGGSGGGGSAQQIILTQSPAIMSASPGEKVTMTCSASSSVSYMHWYQQKSGTSPKRWIYDTSKLASGVPARFSGSGSGTSYSLTISSMEAEDAATYYCQQWSSNPLTFGAGTKLELKRSSEPKSSDKTHTSPPSPCPPCPAPELLGGPSVFLFPPKPKDTLMISRTPEVTCVVVDVSHEDPEVKFNWYVDGVEVHNAKTKPREEQYASTYRVVSVLTVLHQDWLNGKEYKCKVSNKALPAPIEKTISKAKGQPREPQVYTLPPSRDELTKNQVSLTCLVKGFYPSDIAVEWESNGQPENNYKTTPPVLDSDGSFFLYSKLTVDKSRWQQGNVFSCSVMHEALHNHYTQKSLSLSPGK

SEQ ID NO: 322 - DNA, 1734 bp, Artificial Sequence
  Nucleotide sequence encoding BC3 G1 N297A with a hinge derived from IgE CH2 and RSS junction amino acids
caggtccagctgcagcagtctgcagctgaactggcaagacctggggcctcagtgaagatgtcctgcaaggcttctggctacacctttactaggtacacgatgcagtgggtaaaacagaggcctggacagggtctggaatggattggatacattaatcctagtagtggatatattgggtacagtcagaagttcaaggacaagaccacattgactgcagacaaatcctccagcacagcctacatgcaactgagcagtctgacatctgaggactctgcggtctattactgtgcaagatcgaaggtctactatgattacgacgtttattctatggactactggggtcaaggaacctcggtcaccgtctcaagcggtggcggagggtctgggggtggcggatccggaggtggtggctctgcacaacaaattattctcacccagtctccagcaatcatgtctgcatctccaggggagaaggtcaccatgacctgcagtgccagctcaagtgtaagttacatgcactggtaccagcagaagtcaggcacctcccccaaaagatggatttatgacacatccaaactggcttctggcgtccctgctcgcttcagtggcagtgggtctgggacctcttactctctcacaatcagcagcatggaggctgaagatgctgccacttattactgccagcagtggagtagtaatccactcacgttcggtgctgggaccaagctggagctgaaacgctcgagctccagggacttcaccccgcccaccgtgaagatcttacagtcgtccagcgacggcggcgggcacttccccccgaccatccagctcctgtgcctcgtctctgggtacaccccagggactatcaacatcacctggctggaggacgggcaggtcatggacgtggacttgtccaccgcctctaccacgcaggagggtgagctggcctccacacaaagcgagctcaccctcagccagaagcactggctgtcagaccgcacctacacctgccaggtcacctatcaaggtcacacctttgaggacagcaccaagaagtctgcatgcccaccgtgctccggagcacctgaactcctgggtggaccgtcagtcttcctcttccccccaaaacccaaggacaccctcatgatctcccggacccctgaggtcacatgcgtggtggtggacgtgagccacgaagaccctgaggtcaagttcaactggtacgtggacggcgtggaggtgcataatgccaagacaaagccgcgggaggagcagtacgccagcacgtaccgtgtggtcagcgtcctcaccgtcctgcaccaggactggctgaatggcaaggagtacaagtgcaaggtctccaacaaagccctcccagcccccatcgagaaaaccatctccaaagccaaagggcagccccgagaaccacaggtgtacaccctgcccccatcccgggatgagctgaccaagaaccaggtcagcctgacctgcctggtcaaaggcttctatccaagcgacatcgccgtggagtgggagagcaatgggcagccggagaacaactacaagaccacgcctcccgtgctggactccgacggctccttcttcctctacagcaagctcaccgtggacaagagccggtggcagcaggggaacgtcttctcatgctccgtgatgcatgaggctctgcacaaccactacacgcagaagagcctctccctgtctccgggtaaatga

SEQ ID NO: 323 - protein, 577 aa, Artificial Sequence
  BC3 G1 N297A with a hinge derived from IgE CH2 and RSS junction amino acids
QVQLQQSAAELARPGASVKMSCKASGYTFTRYTMQWVKQRPGQGLEWIGYINPSSGYIGYSQKFKDKTTLTADKSSSTAYMQLSSLTSEDSAVYYCARSKVYYDYDVYSMDYWGQGTSVTVSSGGGGSGGGGSGGGGSAQQIILTQSPAIMSASPGEKVTMTCSASSSVSYMHWYQQKSGTSPKRWIYDTSKLASGVPARFSGSGSGTSYSLTISSMEAEDAATYYCQQWSSNPLTFGAGTKLELKRSSSRDFTPPTVKILQSSSDGGGHFPPTIQLLCLVSGYTPGTINITWLEDGQVMDVDLSTASTTQEGELASTQSELTLSQKHWLSDRTYTCQVTYQGHTFEDSTKKSACPPCSGAPELLGGPSVFLFPPKPKDTLMISRTPEVTCVVVDVSHEDPEVKFNWYVDGVEVHNAKTKPREEQYASTYRVVSVLTVLHQDWLNGKEYKCKVSNKALPAPIEKTISKAKGQPREPQVYTLPPSRDELTKNQVSLTCLVKGFYPSDIAVEWESNGQPENNYKTTPPVLDSDGSFFLYSKLTVDKSRWQQGNVFSCSVMHEALHNHYTQKSLSLSPGK

SEQ ID NO: 324 - DNA, 1557 bp, Artificial Sequence
  Nucleotide sequence encoding BC3 G1 N297A with a UBA hinge and RSS junction amino acids
caggtccagctgcagcagtctgcagctgaactggcaagacctggggcctcagtgaagatgtcctgcaaggcttctggctacacctttactaggtacacgatgcagtgggtaaaacagaggcctggacagggtctggaatggattggatacattaatcctagtagtggatatattgggtacagtcagaagttcaaggacaagaccacattgactgcagacaaatcctccagcacagcctacatgcaactgagcagtctgacatctgaggactctgcggtctattactgtgcaagatcgaaggtctactatgattacgacgtttattctatggactactggggtcaaggaacctcggtcaccgtctcaagcggtggcggagggtctgggggtggcggatccggaggtggtggctctgcacaacaaattattctcacccagtctccagcaatcatgtctgcatctccaggggagaaggtcaccatgacctgcagtgccagctcaagtgtaagttacatgcactggtaccagcagaagtcaggcacctcccccaaaagatggatttatgacacatccaaactggcttctggcgtccctgctcgcttcagtggcagtgggtctgggacctcttactctctcacaatcagcagcatggaggctgaagatgctgccacttattactgccagcagtggagtagtaatccactcacgttcggtgctgggaccaagctggagctgaaacgctcgagccaggagaaagaagctatagagaggttgaaggccgcaggcgccccagagagcctggtcatccaggcctatttcgcgagtgagaagaatgagaacttggctgccaacttcctcctgagtcagaactttgatgacgagtgcccaccgtgcccatccggagcacctgaactcctgggtggaccgtcagtcttcctcttccccccaaaacccaaggacaccctcatgatctcccggacccctgaggtcacatgcgtggtggtggacgtgagccacgaagaccctgaggtcaagttcaactggtacgtggacggcgtggaggtgcataatgccaagacaaagccgcgggaggagcagtacgccagcacgtaccgtgtggtcagcgtcctcaccgtcctgcaccaggactggctgaatggcaaggagtacaagtgcaaggtctccaacaaagccctcccagcccccatcgagaaaaccatctccaaagccaaagggcagccccgagaaccacaggtgtacaccctgcccccatcccgggatgagctgaccaagaaccaggtcagcctgacctgcctggtcaaaggcttctatccaagcgacatcgccgtggagtgggagagcaatgggcagccggagaacaactacaagaccacgcctcccgtgctggactccgacggctccttcttcctctacagcaagctcaccgtggacaagagccggtggcagcaggggaacgtcttctcatgctccgtgatgcatgaggctctgcacaaccactacacgcagaagagcctctccctgtctccgggtaaatga

SEQ ID NO: 325 - protein, 518 aa, Artificial Sequence
  BC3 G1 N297A with a UBA hinge and RSS junction amino acids
QVQLQQSAAELARPGASVKMSCKASGYTFTRYTMQWVKQRPGQGLEWIGYINPSSGYIGYSQKFKDKTTLTADKSSSTAYMQLSSLTSEDSAVYYCARSKVYYDYDVYSMDYWGQGTSVTVSSGGGGSGGGGSGGGGSAQQIILTQSPAIMSASPGEKVTMTCSASSSVSYMHWYQQKSGTSPKRWIYDTSKLASGVPARFSGSGSGTSYSLTISSMEAEDAATYYCQQWSSNPLTFGAGTKLELKRSSQEKEAIERLKAAGAPESLVIQAYFASEKNENLAANFLLSQNFDDECPPCPSGAPELLGGPSVFLFPPKPKDTLMISRTPEVTCVVVDVSHEDPEVKFNWYVDGVEVHNAKTKPREEQYASTYRVVSVLTVLHQDWLNGKEYKCKVSNKALPAPIEKTISKAKGQPREPQVYTLPPSRDELTKNQVSLTCLVKGFYPSDIAVEWESNGQPENNYKTTPPVLDSDGSFFLYSKLTVDKSRWQQGNVFSCSVMHEALHNHYTQKSLSLSPGK

SEQ ID NO: 326 - DNA, 1533 bp, Artificial Sequence
  Nucleotide sequence encoding BC3 G1 N297A with a FOS hinge and RSS junction amino acids
caggtccagctgcagcagtctgcagctgaactggcaagacctggggcctcagtgaagatgtcctgcaaggcttctggctacacctttactaggtacacgatgcagtgggtaaaacagaggcctggacagggtctggaatggattggatacattaatcctagtagtggatatattgggtacagtcagaagttcaaggacaagaccacattgactgcagacaaatcctccagcacagcctacatgcaactgagcagtctgacatctgaggactctgcggtctattactgtgcaagatcgaaggtctactatgattacgacgtttattctatggactactggggtcaaggaacctcggtcaccgtctcaagcggtggcggagggtctgggggtggcggatccggaggtggtggctctgcacaacaaattattctcacccagtctccagcaatcatgtctgcatctccaggggagaaggtcaccatgacctgcagtgccagctcaagtgtaagttacatgcactggtaccagcagaagtcaggcacctcccccaaaagatggatttatgacacatccaaactggcttctggcgtccctgctcgcttcagtggcagtgggtctgggacctcttactctctcacaatcagcagcatggaggctgaagatgctgccacttattactgccagcagtggagtagtaatccactcacgttcggtgctgggaccaagctggagctgaaacgctcgagcgagctgactgatacactccaagcggagacagaccaactagaagatgagaagtctgctttgcagaccgagattgccaacctgctgaaggagaaggaaaaactagagttcatctgcccaccgtgcccatccggagcacctgaactcctgggtggaccgtcagtcttcctcttccccccaaaacccaaggacaccctcatgatctcccggacccctgaggtcacatgcgtggtggtggacgtgagccacgaagaccctgaggtcaagttcaactggtacgtggacggcgtggaggtgcataatgccaagacaaagccgcgggaggagcagtacgccagcacgtaccgtgtggtcagcgtcctcaccgtcctgcaccaggactggctgaatggcaaggagtacaagtgcaaggtctccaacaaagccctcccagcccccatcgagaaaaccatctccaaagccaaagggcagccccgagaaccacaggtgtacaccctgcccccatcccgggatgagctgaccaagaaccaggtcagcctgacctgcctggtcaaaggcttctatccaagcgacatcgccgtggagtgggagagcaatgggcagccggagaacaactacaagaccacgcctcccgtgctggactccgacggctccttcttcctctacagcaagctcaccgtggacaagagccggtggcagcaggggaacgtcttctcatgctccgtgatgcatgaggctctgcacaaccactacacgcagaagagcctctccctgtctccgggtaaatga

SEQ ID NO: 327 - protein, 510 aa, Artificial Sequence
  BC3 G1 N297A with a FOS hinge and RSS junction amino acids
QVQLQQSAAELARPGASVKMSCKASGYTFTRYTMQWVKQRPGQGLEWIGYINPSSGYIGYSQKFKDKTTLTADKSSSTAYMQLSSLTSEDSAVYYCARSKVYYDYDVYSMDYWGQGTSVTVSSGGGGSGGGGSGGGGSAQQIILTQSPAIMSASPGEKVTMTCSASSSVSYMHWYQQKSGTSPKRWIYDTSKLASGVPARFSGSGSGTSYSLTISSMEAEDAATYYCQQWSSNPLTFGAGTKLELKRSSELTDTLQAETDQLEDEKSALQTEIANLLKEKEKLEFICPPCPSGAPELLGGPSVFLFPPKPKDTLMISRTPEVTCVVVDVSHEDPEVKFNWYVDGVEVHNAKTKPREEQYASTYRVVSVLTVLHQDWLNGKEYKCKVSNKALPAPIEKTISKAKGQPREPQVYTLPPSRDELTKNQVSLTCLVKGFYPSDIAVEWESNGQPENNYKTTPPVLDSDGSFFLYSKLTVDKSRWQQGNVFSCSVMHEALHNHYTQKSLSLSPGK

SEQ ID NO: 328 - protein, 47 aa, Artificial Sequence
  Linker 133
RSSELTDTLQAETDQLEDEKSALQTEIANLLKEKEKLEFICPPCPSG

SEQ ID NO: 329 - protein, 106 aa, Artificial Sequence
  mouse CH3mu region
SPSTDILTFTIPPSFADIFLSKSANLTCLVSNLATYETLNISWASQSGEPLETKIKIMESHPNGTFSAKGVASVCVEDWNNRKEFVCTVTHRDLPSPQKKFISKPN

SEQ ID NO: 330 - protein, 4 aa, Homo sapiens
CPPC

SEQ ID NO: 331 - protein, 55 aa, Artificial Sequence
  Linker 125
RSSQEKEAIERLKAAGAPESLVIQAYFASEKNENLAANFLLSQNFDDECPPCPSG

SEQ ID NO: 332 - protein, 111 aa, Artificial Sequence; identical to SEQ ID NO: 212
  Linker 126

SEQ ID NO: 333 - protein, 42 aa, Artificial Sequence
  Linker 127
RSSESPKAQASSVPTAQPQAEGSLAKATTAPATTRNTCPPCP

SEQ ID NO: 334 - protein, 13 aa, Artificial Sequence
  Linker 128
RSSPPPPPCPPCP

SEQ ID NO: 335 - protein, 18 aa, Artificial Sequence
  Linker 129
RSSEPKSSDKTHTCPPCP

SEQ ID NO: 336 - protein, 23 aa, Artificial Sequence
  Linker 130
RSSEPKSSDTPPPSPRSPCPPCP

SEQ ID NO: 337 - protein, 23 aa, Artificial Sequence
  Linker 131
RSSEPKSSDKTHTSPPSPCPPCP

SEQ ID NO: 338 - protein, 26 aa, Artificial Sequence
  Linker 132
RSSPSTPPTPSPSTPPTPSPSCPPCP

SEQ ID NO: 339 - protein, 3 aa, Artificial Sequence
  Linker
GGS

SEQ ID NO: 340 - protein, 4 aa, Artificial Sequence
  Linker
GGGS

SEQ ID NO: 341 - protein, 5 aa, Artificial Sequence
  Linker
GGGGS

SEQ ID NO: 342 - protein, 6 aa, Artificial Sequence
  Linker
GGGGGS

SEQ ID NO: 343 - protein, 9 aa, Artificial Sequence
  Linker
GGGSGGGGS

SEQ ID NO: 344 - protein, 13 aa, Artificial Sequence
  Linker
GGGSGGGSGGGGS

SEQ ID NO: 345 - protein, 17 aa, Artificial Sequence
  Linker
GGGSGGGSGGGSGGGGS

SEQ ID NO: 346 - protein, 21 aa, Artificial Sequence
  Linker
GGGSGGGSGGGSGGGSGGGGS

SEQ ID NO: 347 - protein, 25 aa, Artificial Sequence
  Linker
GGGSGGGSGGGSGGGSGGGSGGGGS

SEQ ID NO: 348 - protein, 9 aa, Artificial Sequence
  Linker
GGGSGGGGS

SEQ ID NO: 349 - protein, 14 aa, Artificial Sequence
  Linker
GGGSGGGGSGGGGS

SEQ ID NO: 350 - protein, 19 aa, Artificial Sequence
  Linker
GGGSGGGGSGGGGSGGGGS

SEQ ID NO: 351 - protein, 24 aa, Artificial Sequence
  Linker
GGGSGGGGSGGGGSGGGGSGGGGS

SEQ ID NO: 352 - protein, 29 aa, Artificial Sequence
  Linker
GGGSGGGGSGGGGSGGGGSGGGGSGGGGS

SEQ ID NO: 353 - protein, 27 aa, Artificial Sequence
  Linker
GGGSGGGSGGGSGGGGSGGGGSGGGGS

SEQ ID NO: 354 - protein, 36 aa, Artificial Sequence
  Linker
GGGSGGGSGGGSGGGSGGGGSGGGGSGGGGSGGGGS

SEQ ID NO: 355 - protein, 45 aa, Artificial Sequence
  Linker
GGGSGGGSGGGSGGGSGGGSGGGGSGGGGSGGGGSGGGGSGGGGS

SEQ ID NO: 356 - protein, 10 aa, Artificial Sequence
  Linker
GGGGSGGGGS

SEQ ID NO: 357 - protein, 20 aa, Artificial Sequence
  Linker
GGGGSGGGGSGGGGSGGGGS

SEQ ID NO: 358 - protein, 25 aa, Artificial Sequence
  Linker
GGGGSGGGGSGGGGSGGGGSGGGGS

SEQ ID NO: 359 - protein, 10 aa, Homo sapiens
  human IgG1 upper hinge region
EPKSCDKTHT

SEQ ID NO: 360 - protein, 7 aa, Homo sapiens
  human IgG2 upper hinge region
ERKCCVE

SEQ ID NO: 361 - protein, 12 aa, Homo sapiens
  human IgG3 upper hinge region
ELKTPLGDTTHT

SEQ ID NO: 362 - protein, 10 aa, Homo sapiens
  human IgG3 upper hinge region
EPKSCDTPPP

SEQ ID NO: 363 - protein, 7 aa, Homo sapiens
  human IgG4 upper hinge region
ESKYGPP

SEQ ID NO: 364 - protein, 5 aa, Homo sapiens
  human IgG1 core hinge
CPPCP

SEQ ID NO: 365 - protein, 5 aa, Homo sapiens
  human IgG3 core hinge
CPRCP

SEQ ID NO: 366 - protein, 5 aa, Homo sapiens
  human IgG4 core hinge
CPSCP

SEQ ID NO: 367 - protein, 17 aa, Homo sapiens
  IgG4 upper and core hinge
ELKTPLGDTTHTCPRCP

SEQ ID NO: 368 - protein, 15 aa, Homo sapiens
  IgG4 upper and core hinge
EPKSCDTPPPCPRCP

SEQ ID NO: 369 - protein, 34 aa, Homo sapiens
  human IgD upper hinge region
ESPKAQASSVPTAQPQAEGSLAKATTAPATTRNT

SEQ ID NO: 370 - protein, 24 aa, Homo sapiens
  human IgD upper hinge region
GRGGEEKKKEKEKEEQEERETKTP

SEQ ID NO: 371 - protein, 19 aa, Homo sapiens
  human IgA1 upper hinge
VPSTPPTPSPSTPPTPSPS

SEQ ID NO: 372 - protein, 6 aa, Homo sapiens
  human IgA2 upper hinge
VPPPPP

SEQ ID NO: 373 - protein, 107 aa, Homo sapiens
  human IgECH2 upper hinge-like sequence
VCSRDFTPPTVKILQSSSDGGGHFPPTIQLLCLVSGYTPGTINITWLEDGQVMDVDLSTASTTQEGELASTQSELTLSQKHWLSDRTYTCQVTYQGHTFEDSTKKCA

SEQ ID NO: 374 - protein, 112 aa, Homo sapiens
  human IgM CH2 upper hinge-like sequence
VIAELPPKVSVFVPPRDGFFGNPRKSKLICQATGFSPRQIQVSWLREGKQVGSGVTTDQVQAEAKESGPTTYKVTSTLTIKESDWLGQSMFTCRVDHRGLTFQQNASSMCVP

SEQ ID NO: 375 - protein, 110 aa, Artificial Sequence
  huamn IgG4 AA CH2 with alanine substitutions at F234 and N297
APEALGGPSVFLFPPKPKDTLMISRTPEVTCVVVDVSQEDPEVQFNWYVDGVEVHNAKTKPREEQFNSTYRVVSVLTVLHQDWLNGKEYKCKVSNKGLPSSIEKTISKAK

SEQ ID NO: 376 - protein, 110 aa, Artificial Sequence
  human IgG4 AA CH2 with alanine substitutions at L235 and N297
APEFAGGPSVFLFPPKPKDTLMISRTPEVTCVVVDVSQEDPEVQFNWYVDGVEVHNAKTKPREEQFNSTYRVVSVLTVLHQDWLNGKEYKCKVSNKGLPSSIEKTISKAK

SEQ ID NO: 377 - protein, 110 aa, Artificial Sequence
  human IgG4 AA CH2 with alanine substitutions at G236 and N297
APEFLAGPSVFLFPPKPKDTLMISRTPEVTCVVVDVSQEDPEVQFNWYVDGVEVHNAKTKPREEQFNSTYRVVSVLTVLHQDWLNGKEYKCKVSNKGLPSSIEKTISKAK

SEQ ID NO: 378 - protein, 110 aa, Artificial Sequence
  human IgG4 AA CH2 with alanine substitutions at G237 and N297
APEFLGAPSVFLFPPKPKDTLMISRTPEVTCVVVDVSQEDPEVQFNWYVDGVEVHNAKTKPREEQFNSTYRVVSVLTVLHQDWLNGKEYKCKVSNKGLPSSIEKTISKAK

SEQ ID NO: 379 - protein, 15 aa, Artificial Sequence
  Linker 134
EPMSCDKTHTCPPCP

SEQ ID NO: 380 - protein, 15 aa, Artificial Sequence
  Linker 135
EPMSSDKTHTCPPCP

SEQ ID NO: 381 - protein, 15 aa, Artificial Sequence
  Linker 136
EPMSCDKTHTSPPCP

SEQ ID NO: 382 - protein, 15 aa, Artificial Sequence
  Linker 137
EPMSCDKTHTCPPSP

SEQ ID NO: 383 - protein, 15 aa, Artificial Sequence
  Linker 138
EPMSSDKTHTSPPCP

SEQ ID NO: 384 - protein, 15 aa, Artificial Sequence
  Linker 139
EPMSSDKTHTCPPSP

SEQ ID NO: 385 - protein, 15 aa, Artificial Sequence
  Linker 140
EPMSCDKTHTSPPSP

SEQ ID NO: 386 - protein, 15 aa, Artificial Sequence
  Linker 141
EPMSCDKTHTCPPCS

SEQ ID NO: 387 - protein, 15 aa, Artificial Sequence
  Linker 142
EPMSSDKTHTCPPCS

SEQ ID NO: 388 - protein, 15 aa, Artificial Sequence
  Linker 143
EPMSCDKTHTSPPCS

SEQ ID NO: 389 - protein, 15 aa, Artificial Sequence
  Linker 144
EPMSCDKTHTCPPSS

SEQ ID NO: 390 - protein, 15 aa, Artificial Sequence
  Linker 145
EPMSSDKTHTSPPCS

SEQ ID NO: 391 - protein, 15 aa, Artificial Sequence
  Linker 146
EPMSSDKTHTCPPSP

SEQ ID NO: 392 - protein, 15 aa, Artificial Sequence
  Linker 147
EPMSCDKTHTSPPSS

SEQ ID NO: 393 - protein, 15 aa, Artificial Sequence
  Linker 148
EPTSCDKTHTCPPCP

SEQ ID NO: 394 - protein, 15 aa, Artificial Sequence
  Linker 149
EPTSSDKTHTCPPCP

SEQ ID NO: 395 - protein, 15 aa, Artificial Sequence
  Linker 150
EPTSCDKTHTSPPCP

SEQ ID NO: 396 - protein, 15 aa, Artificial Sequence
  Linker 151
EPTSCDKTHTCPPSP

SEQ ID NO: 397 - protein, 15 aa, Artificial Sequence
  Linker 152
EPTSSDKTHTSPPCP

SEQ ID NO: 398 - protein, 15 aa, Artificial Sequence
  Linker 153
EPTSSDKTHTCPPSP

SEQ ID NO: 399 - protein, 15 aa, Artificial Sequence
  Linker 154
EPTSCDKTHTSPPSP

SEQ ID NO: 400 - protein, 15 aa, Artificial Sequence
  Linker 155
EPTSCDKTHTCPPCS

SEQ ID NO: 401 - protein, 15 aa, Artificial Sequence
  Linker 156
EPTSSDKTHTCPPCS

SEQ ID NO: 402 - protein, 15 aa, Artificial Sequence
  Linker 157
EPTSCDKTHTSPPCS

SEQ ID NO: 403 - protein, 15 aa, Artificial Sequence
  Linker 158
EPTSCDKTHTCPPSS

SEQ ID NO: 404 - protein, 15 aa, Artificial Sequence
  Linker 159
EPTSSDKTHTSPPCS

SEQ ID NO: 405 - protein, 15 aa, Artificial Sequence
  Linker 160
EPTSSDKTHTCPPSS

SEQ ID NO: 406 - protein, 15 aa, Artificial Sequence
  Linker 161
EPTSCDKTHTSPPSS

SEQ ID NO: 407 - protein, 15 aa, Artificial Sequence
  Linker 162
EPASCDKTHTCPPCP

SEQ ID NO: 408 - protein, 15 aa, Artificial Sequence
  Linker 163
EPASSDKTHTCPPCP

SEQ ID NO: 409 - protein, 15 aa, Artificial Sequence
  Linker 164
EPASCDKTHTSPPCP

SEQ ID NO: 410 - protein, 15 aa, Artificial Sequence
  Linker 165
EPASCDKTHTCPPSP

SEQ ID NO: 411 - protein, 15 aa, Artificial Sequence
  Linker 166
EPASSDKTHTSPPCP

SEQ ID NO: 412 - protein, 15 aa, Artificial Sequence
  Linker 167
EPASSDKTHTCPPSP

SEQ ID NO: 413 - protein, 15 aa, Artificial Sequence
  Linker 168
EPASCDKTHTSPPSP

SEQ ID NO: 414 - protein, 15 aa, Artificial Sequence
  Linker 169
EPASCDKTHTCPPCS

SEQ ID NO: 415 - protein, 15 aa, Artificial Sequence
  Linker 170
EPASSDKTHTCPPCS

SEQ ID NO: 416 - protein, 15 aa, Artificial Sequence
  Linker 171
EPASCDKTHTSPPCS

SEQ ID NO: 417 - protein, 15 aa, Artificial Sequence
  Linker 172
EPASCDKTHTCPPSS

SEQ ID NO: 418 - protein, 15 aa, Artificial Sequence
  Linker 173
EPASSDKTHTSPPCS

SEQ ID NO: 419 - protein, 15 aa, Artificial Sequence
  Linker 174
EPASSDKTHTCPPSS

SEQ ID NO: 420 - protein, 15 aa, Artificial Sequence
  Linker 175
EPASCDKTHTSPPSS

SEQ ID NO: 421 - protein, 14 aa, Artificial Sequence
  Linker 176
EPSCDKTHTCPPCP

SEQ ID NO: 422 - protein, 14 aa, Artificial Sequence
  Linker 177
EPSSDKTHTCPPCP

SEQ ID NO: 423 - protein, 14 aa, Artificial Sequence
  Linker 178
EPSCDKTHTSPPCP

SEQ ID NO: 424 - protein, 14 aa, Artificial Sequence
  Linker 179
EPSCDKTHTCPPSP

SEQ ID NO: 425 - protein, 14 aa, Artificial Sequence
  Linker 180
EPSSDKTHTSPPCP

SEQ ID NO: 426 - protein, 14 aa, Artificial Sequence
  Linker 181
EPSSDKTHTCPPSP

SEQ ID NO: 427 - protein, 14 aa, Artificial Sequence
  Linker 182
EPSCDKTHTSPPSP

SEQ ID NO: 428 - protein, 14 aa, Artificial Sequence
  Linker 183
EPSCDKTHTCPPCS

SEQ ID NO: 429 - protein, 14 aa, Artificial Sequence
  Linker 184
EPSSDKTHTCPPCS

SEQ ID NO: 430 - protein, 14 aa, Artificial Sequence
  Linker 185
EPSCDKTHTSPPCS

SEQ ID NO: 431 - protein, 14 aa, Artificial Sequence
  Linker 186
EPSCDKTHTCPPSS

SEQ ID NO: 432 - protein, 14 aa, Artificial Sequence
  Linker 187
EPSSDKTHTSPPCS

SEQ ID NO: 433 - protein, 14 aa, Artificial Sequence
  Linker 188
EPSSDKTHTCPPSS

SEQ ID NO: 434 - protein, 14 aa, Artificial Sequence
  Linker 189
EPSCDKTHTSPPSS

1. A single chain fusion protein, comprising from amino-terminus to carboxy-terminus:
(a) a binding domain that specifically binds to a TCR complex or a component thereof,
(b) a linker polypeptide, and
(c) an immunoglobulin C_{H3} region polypeptide,
wherein the fusion protein does not induce or induces a minimally detectable cytokine release.

2. The fusion protein of claim 1, further comprising an immunoglobulin C_{H2} region polypeptide located carboxy terminal to the linker polypeptide and amino terminal to the immunoglobulin C₁ region polypeptide, wherein the immunoglobulin CH2 region polypeptide comprises:
(i) an amino acid substitution at the asparagine of position 297, and one or more substitutions or deletions at positions 234 to 238;
(ii) one or more substitutions or deletions at positions 234 to 238, and at least one substitution at position 253, 310, 318, 320, 322, or 331; or
(iii) an amino acid substitution at the asparagine of position 297, one or more substitutions or deletions at positions 234 to 238 and at least one substitution at position 253, 310, 318, 320, 322, or 331.

3. The fusion protein of claim 1, wherein the TCR complex or a component thereof is TCRα, TCRβ, or CD3ε.

4. The fusion protein of claim 1, wherein the binding domain is a single chain Fv (scFv) that specifically binds to the TCR complex or a component thereof and comprises an amino acid sequences selected from the group consisting of: SEQ ID NOS:258-264.

5. The fusion protein of claim 1, wherein the linker is an immunoglobulin hinge region polypeptide selected from the group consisting of: a wild type human IgG1 hinge, a human IgG1 hinge with at least one cysteine mutated, and a wild type mouse IGHG2c hinge.

6. (canceled)

7. The fusion protein of claim 5, wherein the immunoglobulin hinge region polypeptide comprises an amino acid sequence selected from the group consisting of: SEQ ID NOS:212-218, 300, 379-434, and amino acids 3-17 of SEQ ID NO:10.

8.-10. (canceled)

11. The fusion protein of claim 2, wherein the asparagine at position 297 is substituted with an alanine.

12. The fusion protein of claim 2, wherein the immunoglobulin C_{H2} region polypeptide comprises:
(i) an amino acid substitution at the asparagine of position 297 and one amino acid substitution at position 234, 235, 236 or 237;
(ii) an amino acid substitution at the asparagine of position 297 and amino acid substitutions at two of positions 234-237;
(iii) an amino acid substitution at the asparagine of position 297 and amino acid substitutions at three of positions 234-237;
(iv) an amino acid substitution at the asparagine of position 297, amino acid substitutions at positions 234, 235 and 237, and an amino acid deletion at position 236;
(v) amino acid substitutions at three of positions 234-237 and amino acid substitutions at positions 318, 320 and 322; or
(vi) amino acid substitutions at three of positions 234-237, an amino acid deletion at position 236, and amino acid substitutions at positions 318, 320 and 322.

13. The fusion protein of claim 2, wherein the immunoglobulin C_{H2} region polypeptide comprises an amino acid sequence selected from the group consisting of: SEQ ID NOS:102-104, 75, and 375-378.

14. The fusion protein of claim 2, wherein the immunoglobulin C_{H2} and C_{H3} region polypeptides are human IgG2 C_{H2} and C_{H3} region polypeptides or IgG4 C_{H2} and C_{H3} region polypeptides.

15. (canceled)

16. The fusion protein of claim 1, wherein the fusion protein does not contain an immunoglobulin C_{H2} region polypeptide.

17. The fusion protein of claim 1, comprising an amino acid sequence selected from the group consisting of SEQ ID NOS:11-16, 74, 101 and 307-309.

18. The fusion protein of claim 1, wherein the fusion protein comprises an amino acid sequence selected from the group consisting of: SEQ ID NOS: 80-97, 265-299, 304 and 306; any one of SEQ ID NOS: 234, 236, 238, and 240 without the first 22 amino acid leader sequence; and any one of SEQ ID NOS:311, 313, 315, 317, 319, 321, 323, 325, and 327 without the first 20 amino acid leader sequence.

19. The fusion protein of claim 1, wherein the fusion protein further does not activate or minimally activates T cells.

20. The fusion protein of claim 1, wherein the fusion protein further has at least one of the activities selected from the group consisting of: inducing calcium flux, inducing phosphorylation of a molecule in the T cell receptor signaling pathway, blocking T cell response to an alloantigen, blocking memory T cell response to an antigen, and downmodulating the TCR complex.

21. A composition comprising the fusion protein of claim 1 and a pharmaceutically acceptable carrier, diluent, or excipient.

22. A unit dose form comprising the pharmaceutical composition of claim 21.

23. A polynucleotide encoding the fusion protein of claim 1.

24. An expression vector comprising a polynucleotide of claim 23 operably linked to an expression control sequence.

25. A method of reducing rejection of solid organ transplant, comprising administering to a solid organ transplant recipient an effective amount of the fusion protein of claim 1.

26. A method for treating an autoimmune disease selected from the group consisting of Crohn's disease, ulcerative colitis, diabetes mellitus, asthma, and arthritis, comprising administering to a patient in need thereof an effective amount of the fusion protein of claim 1.

27.-29. (canceled)

30. A method for detecting cytokine release induced by a protein that comprises a binding domain that specifically binds to a TCR complex or a component thereof, comprising:
(a) providing mitogen-primed T cells,
(b) treating the primed T cells of step (a) with the protein that comprises a binding domain that specifically binding to a TCR complex or a component thereof, and
(c) detecting release of a cytokine from the primed T cells treated in step (b).

31. A method for detecting T cell activation induced by a protein that comprises a binding domain that specifically binds to a TCR complex or a component thereof, comprising:
(a) providing mitogen-primed T cells,
(b) treating the primed T cells of step (a) with the protein that comprises a binding domain that specifically binding to a TCR complex or a component thereof, and
(c) detecting activation of the primed T cells treated in step (b).

32. The method of claim 30, wherein the protein that comprises a binding domain that specifically binds to a TCR complex or a component thereof is the fusion protein of claim 1 or an antibody.

33. (canceled)

34. The method of claim 31, wherein the protein that comprises a binding domain that specifically binds to a TCR complex or a component thereof is the fusion protein of claim 1 or an antibody.

35. A single chain fusion protein, comprising from amino-terminus to carboxy-terminus:
(a) a single chain Fv (scFv) binding domain polypeptide comprising the amino acid sequence of SEQ ID NO:263;
(b) an immunoglobulin hinge region polypeptide comprising amino acids 3-17 of SEQ ID NO:10; and
(c) an immunoglobulin C_{H3} region polypeptide.

36. The fusion protein of claim 35, further comprising an immunoglobulin C_{H2} located carboxy terminal to the hinge region polypeptide and amino terminal to the immunoglobulin C_{H3} region polypeptide, wherein the immunoglobulin CH2 region polypeptide comprises the amino acid sequence of SEQ ID NO:68, except for a deletion of amino acid at position 236, and substitutions of amino acids F234, L235, G237, E318, K320, and K322 with alanine.

37. The fusion protein of claim 35, wherein the immunoglobulin C_{H3} region polypeptide comprises the amino acid sequence of SEQ ID NO:69.
